(19) United States
(12) Patent Application Publication
(10) Pub. No.: US 2022/0220466 A1
(43) Pub. Date: Jul. 14, 2022

(54) CATALYTICALLY INACTIVE BOTULINUM NEUROTOXIN-LIKE TOXINS AND USES THEREOF

(71) Applicant: Children's Medical Center Corporation, Boston, MA (US)

(72) Inventors: Min Dong, Weatogue, CT (US); Shin-Ichiro Miyashita, Brookline, MA (US)

(73) Assignee: Children's Medical Center Corporation, Boston, MA (US)

(21) Appl. No.: 17/603,978

(22) PCT Filed: Apr. 17, 2020
(86) PCT No.: PCT/US2020/028742

§ 371 Date: Oct. 15, 2021

Related U.S. Application Data
(60) Provisional application No. 62/835,151, filed on Apr. 17, 2019.

(51) Int. Cl. C12N 9/52; C07K 14/33

(52) U.S. Cl. CPC C12N 9/52; A61K 38/00; C12Y 304/24069; C07K 14/33

(57) ABSTRACT

Provided herein, in aspects, are catalytically inactive BoNT-like toxins from Clostridium botulinum, serotype X (BoNT/NX) from Enterococcus faecium (BoNT/En) or from Paraclostridium bifermentans (BoNT/PMP1) and their use as delivery vehicles to deliver an agent (e.g., a therapeutic agent or a diagnostic agent) to a cell. Methods of treating a disease (e.g., botulism) are also provided.

### RELATED APPLICATIONS

[0001] This application claims the benefit under 35 U.S.C. § 119(e) of U.S. Provisional Application Ser. No. 62/835,151, entitled “CATALYTICALLY INACTIVE BOTULINUM NEUROTOXIN-LIKE TOXINS AND USES THEREOF” filed on Apr. 17, 2019, the entire contents of which is incorporated herein by reference.

### BACKGROUND

[0002] Many key therapeutic targets are in the cytosol of cells. To reach them, therapeutic and diagnostic agents have to be able to cross cell membranes, which is a formidable challenge for protein/peptide-based therapeutics and membrane impermeable small molecule therapeutics. Furthermore, the ability to specifically target a cell type such as neurons is needed for treating many neuronal disorders. Thus, there is a high demand for a delivery system that can efficiently and safely deliver membrane impermeable therapeutics into cells such as neurons. Botulinum neurotoxins (BoNTs, including eight serotypes BoNT/A-H) are a family of bacterial toxins that target motor nerve terminals with extreme specificity. These toxins are composed of three functional domains: the receptor-binding domain that is responsible for recognizing neurons, the translocation domain that translocates the toxin enzymatic protease domain across cell membranes into the cytosol of cells. The protease domain of BoNTs then cleaves key cellular proteins, which is the basis for the toxicity of BoNTs. Therefore, BoNTs naturally possess the ability to target and deliver a protein cargo (its own protease domain) into the cytosol of neurons, and can be potentially utilized for delivery of therapeutics into neurons. However, it was found that even BoNTs containing a catalytically inactive protease domain still maintained a level of toxicity in vivo and caused paralysis and death in animal models. This is a major barrier for the use of BoNTs as a delivery tool and thus an effective and safe delivery tool targeting the cytosol of cells (e.g. neurons) is still lacking.

### SUMMARY

[0003] The present disclosure, in some aspects, are compositions comprising catalytically inactive botulinum neurotoxins-like toxins from Clostridium botulinum, serotype X (BoNT/X), from Enterococcus faecium (BoNT/En) or from Paraclostridium bifermentans (BoNT/PMP1). BoNT/X, BoNT/En and BoNT/PMP1 share the overall domain arrangement and functionality as the eight traditional BoNTs (BoNT/A-H), but contain high levels of sequence variations from other BoNTs. Therefore, BoNT/X, BoNT/En and BoNT/PMP1 are considered a distinct branch within the BoNT super family. Specifically, BoNT/X, BoNT/En and BoNT/PMP1 contain the protease domain and the translocation domain like other BoNTs, but their receptor-binding domain lacks the ability to target mammalian neurons. The receptor-binding domain of BoNT/X, BoNT/En and BoNT/PMP1 can be replaced with the receptor-binding domain of a traditional BoNTs, which results in chimeric toxins that can target mammalian neurons.

[0004] Accordingly, in some aspects, the present disclosure provides catalytically inactive neurotoxins (BoNTs) from Clostridium botulinum, serotype X (BoNT/X) comprising an inactive protease domain and a translocation domain. In some embodiments, the inactive protease domain comprises one or more substitution mutation(s) in a position corresponding to R360, Y363, H227, E228, or H231 in SEQ ID NO: 1. In some embodiments, the inactive protease domain comprises amino acid substitutions corresponding to E228Q, R360A, and Y363F in SEQ ID NO: 1. In some embodiments, the catalytically inactive BoNT comprises the amino acid sequence of any one of SEQ ID NO: 3 or SEQ ID NO: 21.

[0005] Other aspects of the present disclosure provide catalytically inactive neurotoxins from Enterococcus faecium (BoNT/En) comprising an inactive protease domain and a translocation domain.

[0006] In some embodiments, the inactive protease domain comprises one or more substitution mutation(s) in a position corresponding to H225, E226, H229, R364, or Y367 in SEQ ID NO: 2. In some embodiments, the inactive protease domain comprises amino acid substitutions corresponding to E226Q, R364A, and Y367F in SEQ ID NO: 2. In some embodiments, the catalytically inactive BoNT comprises the amino acid sequence of any one of SEQ ID NO: 4 or SEQ ID NO: 22.

[0007] Further provided herein are catalytically inactive neurotoxins from Paraclostridium bifermentans (BoNT/PMP1) comprising an inactive protease domain and a translocation domain. In some embodiments, the inactive protease domain comprises one or more substitution mutation(s) in a position corresponding to H208, E209, H212, R344, or Y347 in SEQ ID NO: 85. In some embodiments, the inactive protease domain comprises amino acid substitutions corresponding to E209Q, R344A, and Y347F in SEQ ID NO: 85. In some embodiments, the catalytically inactive BoNT comprises the amino acid sequence of any one of SEQ ID NO: 86 or SEQ ID NO: 95.

[0008] Other aspects of the present disclosure provide chimeric Clostridium botulinum neurotoxins (BoNTs) comprising:

[0009] (a) a light chain comprising an inactive protease domain,

[0010] (b) a heavy chain comprising:
[0011] (i) a translocation domain, and
[0012] (ii) a receptor binding domain,
   wherein (a) and (b)(i) are from a neurotoxin in Clostridium botulinum, serotype X, Enterococcus faecium or Paraclostridium bifermentans, and wherein (b)(ii) is from a BoNT in Clostridium botulinum, serotype A, B, C, D, E, F, G or H.

[0013] In some embodiments, the chimeric BoNT comprises a modified linker between the light chain and the heavy chain. In some embodiments, the modified linker comprises a protease cleavage site.

[0014] In some embodiments, (a) and (b)(i) are from a neurotoxin in Clostridium botulinum, serotype X. In some embodiments, the inactive protease domain comprises one or more substitution mutation(s) in a position corresponding to R360, Y363, H227, E228, or H231 in SEQ ID NO: 1. In some embodiments, the inactive protease domain comprises amino acid substitutions corresponding to E228Q, R360A, and Y363F in SEQ ID NO: 1. In some embodiments, b(ii) is from a BoNT in Clostridium botulinum, serotype A (BoNT/A), serotype B (BoNT/B), serotype C (BoNT/C), serotype D (BoNT/D), serotype E (BoNT/E), serotype F (BoNT/F), serotype G (BoNT/G), or serotype H (BoNT/H). In some embodiments, the chimeric BoNT comprises an amino acid sequence that is at least 85%, at least 86%, at least 87%, at least 88%, at least 89%, at least 90%, at least 91%, at least 92%, at least 93%, at least 94%, at least 95%, at least 96%, at least 97%, at least 98%, at least 99%, or at least 99.5% identical to the amino acid sequence of any one of SEQ ID NOs: 5-12 and 23-30, and comprises amino acid substitutions corresponding to E228Q, R360A, and Y363F in SEQ ID NO: 1. In some embodiments, the chimeric BoNT comprises the amino acid sequence of any one of SEQ ID NOs: 5-12 and 23-30. In some embodiments, the chimeric BoNT consists of the amino acid sequence of any one of SEQ ID NOs: 5-12 and 23-30.

[0015] In some embodiments, (a) and (b)(i) are from a neurotoxin in Enterococcus faecium. In some embodiments, the inactive protease domain comprises one or more substitution mutation(s) in a position corresponding to H225, E226, H229, R364, or Y367 in SEQ ID NO: 2. In some embodiments, the inactive protease domain comprises amino acid substitutions corresponding to E226Q, R364A, or Y367F in SEQ ID NO: 2. In some embodiments, b(ii) is from BoNT in Clostridium botulinum, serotype A (BoNT/A), serotype B (BoNT/B), serotype C (BoNT/C), serotype D (BoNT/D), serotype E (BoNT/E), serotype F (BoNT/F), serotype G (BoNT/G), or serotype H (BoNT/H). In some embodiments, the chimeric BoNT comprises an amino acid sequence that is at least 85%, at least 86%, at least 87%, at least 88%, at least 89%, at least 90%, at least 91%, at least 92%, at least 93%, at least 94%, at least 95%, at least 96%, at least 97%, at least 98%, at least 99%, or at least 99.5% identical to the amino acid sequence of any one of SEQ ID NOs: 13-20 and 31-38, and comprises amino acid substitutions corresponding to E226Q, R364A, and Y367F in SEQ ID NO: 2. In some embodiments, the chimeric BoNT comprises the amino acid sequence of any one of SEQ ID NOs: 13-20 and 31-38. In some embodiments, the chimeric BoNT consists of the amino acid sequence of any one of SEQ ID NOs: 13-20 and 31-38.

[0016] In some embodiments, (a) and the (b)(i) are from a neurotoxin in Paraclostridium bifermentans. In some embodiments, the inactive protease domain comprises one or more substitution mutation(s) in a position corresponding to H208, E209, H212, R344, or Y347 in SEQ ID NO: 85. In some embodiments, the inactive protease domain comprises amino acid substitutions corresponding to E209Q, R344A, and Y347F in SEQ ID NO: 85.

[0017] In some embodiments, b(ii) is from BoNT in Clostridium botulinum, serotype A (BoNT/A), serotype B (BoNT/B), serotype C (BoNT/C), serotype D (BoNT/D), serotype E (BoNT/E), serotype F (BoNT/F), serotype G (BoNT/G), or serotype H (BoNT/H). In some embodiments, the chimeric BoNT comprises an amino acid sequence that is at least 85%, at least 86%, at least 87%, at least 88%, at least 89%, at least 90%, at least 91%, at least 92%, at least 93%, at least 94%, at least 95%, at least 96%, at least 97%, at least 98%, at least 99%, or at least 99.5% identical to the amino acid sequence of any one of SEQ ID NOs: 87-94 and 96-103, and comprises amino acid substitutions corresponding to E209Q, R344A, and Y347F in SEQ ID NO: 85.

[0018] In some embodiments, the chimeric BoNT comprises the amino acid sequence of any one of SEQ ID NOs: 87-94 and 96-103. In some embodiments, the chimeric BoNT consists of the amino acid sequence of any one of SEQ ID NOs: 87-94 and 96-103.

[0019] In some embodiments, the light chain and the heavy chain are linked by a di-sulfide bond. Other aspects of the present disclosure provide nucleic acids encoding any one of the catalytically inactive BoNT/X, any one of the catalytically inactive BoNT/EN, any one of the catalytically inactive BoNT/PMP1, or any one of the chimeric BoNT described herein. Vectors comprising such nucleic acids, and cells comprising any one of the catalytically inactive BoNT/X, any one of the catalytically inactive BoNT/EN, any one of the catalytically inactive BoNT/PMP1, or any one of the chimeric BoNT, the nucleic acid, or the vector described herein are also provided.

[0020] Other aspects of the present disclosure provide compositions comprises any one of the catalytically inactive BoNT/X, any one of the catalytically inactive BoNT/EN, any one of the catalytically inactive BoNT/PMP1, or any one of the chimeric BoNT. In some embodiments, the composition is a pharmaceutical composition. In some embodiments, the composition further comprises a pharmaceutically acceptable carrier.

[0021] Further provided herein are uses of any one of the catalytically inactive BoNT/X, any one of the catalytically inactive BoNT/EN, any one of the catalytically inactive BoNT/PMP1, or any one of the chimeric BoNT described herein as a delivery vehicle.

[0022] Accordingly, some aspects of the present disclosure provide a complex comprising any one of the catalytically inactive BoNT/X, any one of the catalytically inactive BoNT/EN, any one of the catalytically inactive BoNT/PMP1, or any one of the chimeric BoNTs associated with an agent.

[0023] In some embodiments, the agent is associate with the catalytically inactive BoNT/X, the catalytically inactive BoNT/En, the catalytically inactive BoNT/PMP1, or the chimeric BoNT non-covalently. In some embodiments, the agent is fused to the catalytically inactive BoNT/X, the catalytically inactive BoNT/EN, the catalytically inactive BoNT/PMP1, or the chimeric BoNT via a covalent bond. In some embodiments, the agent is associated with the light chain or the heavy chain of the catalytically inactive BoNT/X, the catalytically inactive BoNT/En, the catalytically inactive BoNT/PMP1, or the chimeric BoNT.

[0024] In some embodiments, the complex comprises a chimeric BoNT associated with an agent, wherein the BoNT comprises:

[0025] (a) a light chain comprising an inactive protease domain,

[0026] (b) a heavy chain comprising:
[0027] (i) a translocation domain, and
[0028] (ii) a receptor binding domain,

[0029] wherein (a) and (b)(i) are from a neurotoxin in Clostridium botulinum, serotype X, and wherein (b)(ii) is from a BoNT in Clostridium botulinum, serotype A, B, C, D, E, F, G, or H,

[0030] and wherein the light chain and the heavy chain are linked via a disulfide bond.

[0031] In some embodiments, the complex comprises a chimeric BoNT associated with an agent, wherein the BoNT comprises:

[0032] (a) a light chain comprising an inactive protease domain,

[0033] (b) a heavy chain comprising:
[0034] (i) a translocation domain, and
[0035] (ii) a receptor binding domain,

[0036] wherein (a) and (b)(i) are from a neurotoxin in Enterococcus faecium, and wherein (b)(ii) is from a BoNT in Clostridium botulinum, serotype A, B, C, D, E, F, G, or H,

[0037] and wherein the light chain and the heavy chain are linked via a disulfide bond.

[0038] In some embodiments, the complex comprises a chimeric BoNT associated with an agent, wherein the BoNT comprises:
[0039] (a) a light chain comprising an inactive protease domain,
[0040] (b) a heavy chain comprising:
[0041] (i) a translocation domain, and
[0042] (ii) a receptor binding domain,

[0043] wherein (a) and (b)(i) are from a neurotoxin in Enterococcus faecium, and wherein (b)(ii) is from a BoNT in Paraclostridium bifermentans, serotype A, B, C, D, E, F, G, or H, and wherein the light chain and the heavy chain are linked via a disulfide bond. In some embodiments, in any one of the complexes described herein, the receptor binding domain is from a BoNT in Clostridium botulinum, serotype A. In some embodiments, the agent is fused to the N-terminus of the light chain. In some embodiments, the agent is a nucleic acid, a peptide/protein, or a small molecule. In some embodiments, the agent is a diagnostic agent. In some embodiments, the agent is a therapeutic agent.

[0044] In some embodiments, the therapeutic agent is an antibody. In some embodiments, the antibody is a single-domain antibody (also known as nanobody or VHH). In some embodiments, the antibody is an antibody against a BoNT light chain. In some embodiments, the antibody comprises the amino acid sequence of any one of SEQ ID NO: 57, SEQ ID NO: 58, SEQ ID NO: 67, SEQ ID NO: 113, and SEQ ID NO: 114. In some embodiments, the therapeutic agent is a fusion protein comprising two VHHs. In some embodiments, the fusion protein comprises a VHH against BoNT/A light chain fused to a VHH against BoNT/B light chain. In some embodiments, the complex comprises an amino acid sequence that is at least 85%, at least 86%, at least 87%, at least 88%, at least 89%, at least 90%, at least 91%, at least 92%, at least 93%, at least 94%, at least 95%, at least 96%, at least 97%, at least 98%, at least 99%, or at least 99.5% identical to the amino acid sequence of any one of SEQ ID NOs: 65, 66, 71, 75, 76, 119, 128, 129, 133, 134, 137, 138, and 142-150. In some embodiments, the complex comprises an amino acid sequence of any one of SEQ ID NOs: 65, 66, 71, 75, 76, 119, 128, 129, 133, 134, 137, 138, and 142-150.

[0045] Other aspects of the present disclosure provide compositions comprising any one of the complexes described herein. In some embodiments, the composition is a pharmaceutical composition. In some embodiments, the composition further comprising a pharmaceutically acceptable carrier.

[0046] Uses of any one of the complexes described herein or compositions comprising such are also provided. In some embodiments, the complexes used for delivering the agent to a cell. In some embodiments, the complex is used for treating or diagnosing a disease.

[0047] Accordingly, some aspects of the present disclosure provide a method of delivering an agent to a cell, comprising contacting the cell with any one of the complexes or compositions described herein. In some embodiments, the cell is in vitro, in vivo, or ex vivo. In some embodiments, the cell is a neuron.

[0048] Other aspects of the present disclosure provide methods of diagnosing a disease, the method comprising administering to a subject in need thereof an effective amount of any one of the complexes or any one of the compositions described herein, wherein the agent is a diagnostic agent. Further provided herein are methods of treating a disease, the method comprising administering to a subject in need thereof an effective amount of any one of the complexes or any one of the compositions described herein, wherein the agent is a therapeutic agent. In some embodiments, the disease is botulism. In some embodiments, the subject has previously been administered a BoNT or been in contact with a BoNT. In some embodiments, the therapeutic agent neutralizes the BoNT. In some embodiments, the complex is administered by injection. In some embodiments, the subject is a human. In some embodiments, the subject is a rodent. In some embodiments, the rodent is a mouse or a rat.

[0049] The summary above is meant to illustrate, in a non-limiting manner, some of the embodiments, advantages, features, and uses of the technology disclosed herein. Other embodiments, advantages, features, and uses of the technology disclosed herein will be apparent from the Detailed Description, the Drawings, the Examples, and the Claims.

### BRIEF DESCRIPTION OF THE DRAWINGS

[0050] The accompanying drawings are not intended to be drawn to scale. In the drawings, each identical or nearly identical component that is illustrated in various figures is represented by a like numeral. For purposes of clarity, not every component may be labeled in every drawing. The patent or application file contains at least one drawing executed in color. Copies of this patent or patent application publication with color drawing(s) will be provided by the Office upon request and payment of the necessary fee. In the drawings:

[0051] FIGS. 1A-1B show the overall design of VHH fused with inactive LC-H_{N} of a BoNT-like toxin, and a Hc of a BoNT. (FIG. 1A) Schematic model showing the design of fusion proteins. The Hc/A is used as an example to generate VHH-^{ci}BoNT/XA, VHH-^{ci}BoNT/EnA, and VHH-^{ci}BoNT/PmA. TrxA, Thioredoxin A; VHH, a VHH against the LC of BoNT/A (also known as A8); ^{ci}LC, catalytically inactive light chain; HC, heavy chain; Hn, translocation domain; Hc, binding domain. The Hc/A can be replaced with the Hc from other BoNTs (BoNT/B-H). The three amino acid in the active site of LC/X mutated to abolish the metalloprotease activity (E228Q, R360A, and Y363F) were indicated as an example for generating catelytically inactive form (^{ci}LC/X, ^{ci}LC/En, and ^{ci}LC/Pm). The thrombin cleavage sites (*) were introduced for TrxA and His tag removal. A designed long linker containing a thrombin site was introduced to replace the original linker between ^{ci}LC and Hn domain. (FIG. 1B) Thrombin treated-VHH-^{ci}BoNT/XA was subjected to SDS-PAGE in the presence or absence of DTT, showing that the LC and HC are separated after thrombin treatment in the presence of DTT.

[0052] FIGS. 2A-2B show neutralization activity of VHH-^{ci}BoNT/XA on cultured neuron. (FIG. 2A) Schematic experiment of BoNT/A neutralization by VHH-^{ci}BoNT in cultured neuron. Neurons were exposed to 20 pM of BoNT/A for 12 h (0.5 days). The residual BoNT/A in medium were washed with culture medium. The intoxicated-neuron were further incubated with VHH-^{ci}BoNT/XA for indicated days. (FIG. 2B) Neutralization of BoNT/A in a neuron at 1, 3 and 5 days. Immunoblot analysis was carried out to detect SNAP-25. Actin was used as a loading control.

[0053] FIGS. 3A-3E show neutralization activity of VHH-^{ci}BoNT/XA via IM injection in vivo in mouse. (FIG. 3A) Muscle paralysis patterns following BoNT/A IM injection. The corresponding DAS score is listed on each picture. (FIG. 3B) Schematic experiment of BoNT/A-neutralization by VHH-^{ci}BoNT/XA in vivo. 5.8 pg of BoNT/A were injected in mouse hind limb muscle. After 18 hours, the mice showed paralysis (DAS score 2-3) and VHH-^{ci}BoNT/XA were injected in the same muscle and DAS score were recorded. (FIG. 3C) VHH-^{ci}BoNT/XA treated paralysis on mouse gastrocnemius muscle. 0.6 μg of VHH-^{ci}BoNT/XA or ^{ci}BoNT/XA were injected to BoNT/A-injected gastrocnemius muscle. (FIG. 3D) Time course of muscle paralysis recovery by VHH-^{ci}BoNT/XA (N=8). (FIG. 3E) 5.8 pg of BoNT/A were injected in mouse hind limb muscle. After 3 or 6 days, 0.6 ug of VHH-^{ci}BoNT/XA were injected in the same muscle and DAS score were recorded. VHH-^{ci}BoNT/XA treatment stopped muscle paralysis within 24 h.

[0054] FIGS. 4A-4D show IP-injected VHH-^{ci}BoNT/XA neutralized the BoNT/A induced paralysis at the leg. (FIG. 4A) 5.8 pg of BoNT/A were injected in mouse hind limb muscle. After 18 h, the mice showed paralysis (DAS score 2-3) and 600, 60, 6 ug of VHH-^{ci}BoNT/XA were administrated by IP injection. (FIG. 4B) BoNT/A were injected as described (FIG. 4A). 6 ug of VHH-^{ci}BoNT/C were administrated by IP injection. VHH-^{ci}BoNT/C serves as a control, showing that VHH-^{ci}BoNT/XA is superior in inhibiting BoNT/A-induced paralysis. (FIG. 4C) 6 ug of VHH-^{ci}BoNT/XA or /C were administrated by IP injected at 18 and 96 h after BoNT/A injection. (FIG. 4D) 6 ug of VHH-^{ci}BoNT/XA were administrated by IP injection per day.

[0055] FIGS. 5A-5B show the neutralization of BoNT/A by VHH-^{ci}BoNT/XA in a systematic mouse lethality model. (FIG. 5A) 20 pg of BoNT/A were administrated to mouse by IP. After 10 hours, the mice showed botulism phenotype were randomly separated into four groups (group 1; vehicle, 0.2% gelatin-saline, group 2; VHH and ^{ci}BoNT/XA mixture, group 3; 6 ug of VHH-^{ci}BoNT/XA, group 4; 0.6 ug of VHH-^{ci}BoNT/XA). VHH-^{ci}BoNT/XA were administrated to the mouse by IP and monitored for survival to 5 days. (FIG. 5B) A 90% survival was observed in groups treated with the 6 ug of VHH-^{ci}BoNT/XA compared to 0% survival in vehicle and the mixture of VHH and ^{ci}BoNT/XA.

[0056] FIGS. 6A-6C show the neutralization of BoNT/A and BoNT/B by a double VHH B8-B10-^{ci}BoNT/XA in DAS assay. (FIG. 6A) Schematic drawing of the VHH-B8-B10-^{ci}BoNT/XA constructs. B8 targets LC/A, while B10 targets LC/B. BoNT/A (5.8 pg) or BoNT/B (3.5 pg) were injected in mouse hind limb muscle. After 18 hours, 6 μg of VHH B8-B10-^{ci}BoNT/XA were injected in the same muscle and DAS score were recorded. (FIG. 6B) Representative image showing that VHH-B8-B10-^{ci}BoNT/XA treatment shortened the duration of muscle paralysis induced by BoNT/A (left panel) and BoNT/B (right panel). (FIG. 6C) DAS scores over time is recorded. VHH B8-B10-^{ci}BoNT/XA was effective in shortening the duration of paralysis induced by BoNT/A (left panel) and BoNT/B (right panel). *VHH B8-B10 is also referred to as “VHH A8-J10” herein.

[0057] FIGS. 7A-7E show a chimeric inactive toxin ^{ci}BoNT/XA delivered the fused nanobody against LC/A into neurons. (FIG. 7A) Schematic drawing of the A8-^{ci}BoNT/XA fusion protein. The LCH_{N}/X is fused with a BoNT-Hc (Hc/A, Hc/C, or Hc/D). LC/X is deactivated by three point-mutations. The linker region between LC/X and H_{N}/X is modified to include a thrombin cleavage site. A8: VHH-ALc-B8, a nanobody that neutralizes LC/A. (FIG. 7B) A schematic illustration of delivering nanobodies via fusion with ^{ci}BoNT/XA to neutralize BoNT-LC in neurons. LC/A cleaves SNAP-25 in neurons, thus blocking fusion of synaptic vesicles to plasma membranes, which is essential for neurotransmitter release. Nanobodies such as A8 cannot enter neurons by themselves. When fused with ^{ci}BoNT/XA, A8-^{ci}BoNT/XA targets and enters neurons via receptor-mediated endocytosis, followed with translocation of A8-^{ci}LC/X into the cytosol. A8-^{ci}LC/X then binds to and inhibits LC/A in neurons. (FIG. 7C) Cultured neurons were exposed to A8-^{ci}BoNT/XA for 12 h with or without bafilomycin A1. Neurons were washed and neuron lysates were harvested for immunoblot analysis under non-reducing conditions to detect A8 using a goat anti-llama antibody. Successful translocation of A8-^{ci}LC/X into the cytosol reduced the disulfide bond connecting it to the H_{N}-Hc, thus generating the A8-^{ci}LC/X band. A8-^{ci}BoNT/XA that did not translocate into the cytosol remained as a full-length protein under non-reducing conditions. Bafilomycin A1 inhibits acidification of endosomes, thus blocking translocation of A8-^{ci}LC/X. Bafilomycin A1 treatment did not affect binding of A8-^{ci}BoNT/XA to neurons, but reduced A8-^{ci}LC/X. Cell lysates were also analyzed in the presence of DTT, which reduces the inter-chain disulfide bond between A8-^{ci}LC and H_{N}-H_{C}, serving as a loading control. One of three independent experiments is shown. (FIG. 7D) Active forms of BoNT/XA and A8-BoNT/XA were generated via sortase-mediated ligation as described in FIGS. 13A and 13B. Cultured neurons were exposed to these toxins and cleavage of VAMP2 was analyzed by immunoblot. SNAP-25 served as a loading control. Representative blots (one of three independent experiments) and quantification of dose-dependent VAMP2 cleavage are shown. The efficacy of VAMP2 cleavage by A8-BoNT/XA is ˜7.4-fold lower than BoNT/XA. Date were shown as mean±s.e.m. (FIG. 7E) Cultured rat cortical neurons were first exposed to BoNT/A (20 pM, 12 h), washed, further incubated in toxin-free medium for 24 h, and then exposed to the indicated concentrations of either A8-^{ci}BoNT/XA or the control mixture of A8 and ^{ci}BoNT/XA proteins for 48 h. Cell lysates were analyzed by immunoblot to detect SNAP-25, Syntaxin 1, and VAMP2. Actin served as a loading control. Representative blots (one of three independent experiments) and quantification of SNAP-25 cleavage are shown. Cleavage of SNAP-25 by BoNT/A generates a smaller band marked by an arrow. A8-^{ci}BoNT/XA reduced cleavage of SNAP-25 by BoNT/A in neurons, while the control A8 and ^{ci}BoNT/XA mixture did not affect cleavage of SNAP-25. Data were analyzed by one-way ANOVA with Dunnett post-hoc tests, *P=0.0234 and **P=0.0055.

[0058] FIGS. 8A-8F show post-exposure treatment of BoNT/A-induced local paralysis using A8-^{ci}BoNT/XA. (FIG. 8A) Schematic illustration of the DAS assay and representative images showing the degrees of toe spreading. Score “0” represents no paralysis and score “4” represents the most severe paralysis. (FIG. 8B) Intramuscular (IM) injection of BoNT/A (6 pg) in the mouse hind leg induced persistent local paralysis that lasted 30-40 days. The indicated amounts of A8-^{ci}BoNT/XA were injected into the same leg muscle 18 h after the initial injection of BoNT/A. DAS scores were recorded and plotted over time. The DAS score in the first five days were enlarged (right-upper panel). Injection of A8 or ^{ci}BoNT/XA alone served as controls (right-lower panel). Vehicle, n=22; A8-^{ci}BoNT/XA at 6,000, 200, 60, and 20 ng, n=8; A8-^{ci}BoNT/XA at 600 ng, n=16. (FIG. 8C) A8-^{ci}BoNT/XA (600 ng) were injected via IM into the leg muscle 3 days (circle) or 6 days (triangle) after the initial injection of BoNT/A (6 pg) to the same muscle, and the DAS scores were plotted over time (vehicle, n=16; A8-^{ci}BoNT/XA at day 3, n=14; A8-^{ci}BoNT/XA at day 6, n=8). (FIG. 8D) A8-^{ci}BoNT/XA (600 ng and 60 ng) were injected via IM into the leg muscle 3 days after the initial injection of BoNT/A (6 pg). DAS scores were recorded every 3 h for 24 h (n=8 per group). The differences in DAS scores at 6 h were determined to be significant by two-way ANOVA with Dunnett post-hoc tests, ***P<0.0001. (FIG. 8E) A8-^{ci}BoNT/XA at the indicated doses was administered via IP injection 18 h after the initial injection of BoNT/A (6 pg) to the leg muscle. DAS scores were plotted over time (n=8 per group). (FIG. 8F) A8-^{ci}BoNT/XA (6 μg per mouse) was injected either twice (solid triangle, 18 and 42 h) after the initial injection of BoNT/A (6 pg) to the leg muscle, or once per day for seven days (circle, with the first one 18 h after the initial injection of BoNT/A). Vehicle, n=19; A8-^{ci}BoNT/XA, n=8.

[0059] FIGS. 9A-9D show post-exposure treatment of systemic toxicity of BoNT/A using A8-^{ci}BoNT/XA. (FIG. 9A) A systemic toxicity model of botulism and post-exposure treatment using A8-^{ci}BoNT/XA. Lethal dose of BoNT/A (19.5 pg) was first injected into mice via IP to induce systemic botulism. A8-^{ci}BoNT/XA or the control mixture of A8 and ^{ci}BoNT/XA proteins were injected via IP 9 h later when botulism symptoms had developed. (FIG. 9B) Experiments were carried out as described in panel A with the indicated concentrations of A8-^{ci}BoNT/X and the control A8/^{ci}BoNT/X mixture (vehicle, n=14; A8-^{ci}BoNT/XA at 30 and 0.6 μg, n=9; A8-^{ci}BoNT/XA at 6 μg, n=10; A8 (3 μg)/^{ci}BoNT/XA (27 μg), n=9; A8 (0.6 μg)/^{ci}BoNT/XA (5.4 μg), n=10). Survival rates are plotted (statistical analysis was conducted by log-rank test. ****P<0.0001). (FIG. 9C) Violin plots of clinical scores of each mouse. The humane endpoint was set as clinical scores above 5. (FIG. 9D) The body weight changes of control mice ((−)BoNT/A) and the indicated experimental groups are plotted.

[0060] FIGS. 10A-10I show delivery of two nanobodies using ^{ci}BoNT/XA for post-exposure treatment of BoNT/A and BoNT/B intoxication. (FIG. 10A) Schematic drawing of ^{ci}BoNT/XA with two nanobodies (A8 against LC/A and J10 against LC/B) fused to its N-terminus. The fusion protein is termed A8-J10-^{ci}BoNT/XA. (FIG. 10B) DAS assays were carried out with BoNT/A (6 pg). The indicated concentrations of A8-J10-^{ci}BoNT/XA were injected into the same leg muscle 18 h later and DAS scores were plotted over time. Mixtures of A8-J10 and ^{ci}BoNT/XA proteins did not affect the duration of paralysis (B, vehicle, n=9; A8-J10-^{ci}BoNT/XA of each group and A8-J10 (5 μg)/^{ci}BoNT/XA (27 μg), n=8). (FIG. 10C) DAS assays were carried out with BoNT/B (3.5 pg). The indicated concentrations of A8-J10-^{ci}BoNT/XA were injected into the same leg muscle 18 h later and DAS scores were plotted over time. Mixtures of A8-J10 and ^{ci}BoNT/XA proteins did not affect the duration of paralysis (C, vehicle, n=27; A8-J10-^{ci}BoNT/XA at 30, 6, and 0.06 μg, n=10; at 0.6 μg, n=9). (FIG. 10D) Lethal doses of BoNT/A (19.5 pg) were injected via IP administration into mice to induce systemic botulism. The indicated concentrations of A8-J10-^{ci}BoNT/XA were injected via IP 9 h after injection of BoNT/A. Mixtures of A8-J10 and ^{ci}BoNT/XA served as controls. Survival rates are shown (vehicle, n=12; other groups, n=8). ****P<0.0001, **P=0.00022 (log-rank test). (FIG. 10E) Lethal doses of BoNT/A (19.5 pg) were injected via IP administration into mice to induce systemic botulism. The indicated concentrations of A8-J10-^{ci}BoNT/XA were injected via IP 9 h after injection of BoNT/A. Mixtures of A8-J10 and ^{ci}BoNT/XA served as controls. Clinical scores are shown (vehicle, n=12; other groups, n=8). ****P<0.0001, **P=0.00022 (log-rank test). (FIG. 10F) Lethal doses of BoNT/A (19.5 pg) were injected via IP administration into mice to induce systemic botulism. The indicated concentrations of A8-J10-^{ci}BoNT/XA were injected via IP 9 h after injection of BoNT/A. Mixtures of A8-J10 and ^{ci}BoNT/XA served as controls. Body weight changes are shown (vehicle, n=12; other groups, n=8). ****P<0.0001, **P=0.00022 (log-rank test). (FIG. 10G) Lethal doses of BoNT/B (10 pg) were injected via IP administration into mice to induce systemic botulism. The indicated concentrations of A8-J10-^{ci}BoNT/XA were injected via IP 9 h after injection of BoNT/B. Survival rates are shown (vehicle, n=10; A8-J10-^{ci}BoNT/XA at 65 μg, n=8; at 32.5 μg, n=11; A8-J10 (12 μg)/^{ci}BoNT/XA (53 μg), n=8; A8-J10 (6 μg)/^{ci}BoNT/XA (26.5 μg), n=9). ****P<0.0001 (log-rank test). (FIG. 10H) Lethal doses of BoNT/B (10 pg) were injected via IP administration into mice to induce systemic botulism. The indicated concentrations of A8-J10-^{ci}BoNT/XA were injected via IP 9 h after injection of BoNT/B. Clinical scores are shown (vehicle, n=10; A8-J10-^{ci}BoNT/XA at 65 μg, n=8; at 32.5 μg, n=11; A8-J10 (12 μg)/^{ci}BoNT/XA (53 μg), n=8; A8-J10 (6 μg)/^{ci}BoNT/XA (26.5 μg), n=9). ****P<0.0001 (log-rank test). (FIG. 10I) Lethal doses of BoNT/B (10 pg) were injected via IP administration into mice to induce systemic botulism. The indicated concentrations of A8-J10-^{ci}BoNT/XA were injected via IP 9 h after injection of BoNT/B. Body weight changes are shown (vehicle, n=10; A8-J10-^{ci}BoNT/XA at 65 μg, n=8; at 32.5 μg, n=11; A8-J10 (12 μg)/^{ci}BoNT/XA (53 μg), n=8; A8-J10 (6 μg)/^{ci}BoNT/XA (26.5 μg), n=9). ****P<0.0001 (log-rank test).

[0061] FIGS. 11A-11F show production and Characterization of A8-^{ci}BoNT/XA, XC, and XD. (FIG. 11A) Schematic drawing of A8-^{ci}BoNT/XC and XD fusion proteins. (FIG. 11B) ^{ci}BoNT/XA, A8-^{ci}BoNT/XA, XC, and XD were generated as described in FIG. 7A. They were expressed and purified as His6-tagged proteins in E. coli, then activated by thrombin, which cleaves the linker region between the LC and H_{N}. Activated proteins were analyzed on SDS-PAGE gels with or without DTT, which reduces the disulfide bond connecting the LC and H_{N}. The activated proteins ran as a single band without DTT and were converted to two bands with DTT. (FIG. 11C) LC/A was incubated with rat brain detergent extracts (BDE) in the presence of A8 alone or A8-^{ci}BoNT/XA. Cleavage of SNAP-25 by LC/A was analyzed by immunoblot. A8-^{ci}BoNT/XA and A8 alone showed similar capability of neutralizing LC/A in vitro. One of two independent experiments is shown. (FIG. 11D) Cultured rat cortical neurons were exposed to BoNT/A (20 pM, 12 h), washed, and further incubated in toxin-free medium for 24 h. Neurons were then exposed to the indicated concentrations of A8-^{ci}BoNT/XA, XC, and XD for 48 h. Cell lysates were collected and analyzed by immunoblot to detect SNAP-25, Syntaxin 1, and VAMP2. Actin served as a loading control. A8-^{ci}BoNT/XA, XC, and XD reduced SNAP-25 cleavage in neurons. One of two independent experiments is shown. (FIG. 11E) DAS assays were carried out with BoNT/A (6 pg). The indicated concentrations of A8-^{ci}BoNT/XC were injected into the same muscle 18 h later. DAS scores were recorded and plotted over time. (n=8 per group). (FIG. 11F) DAS assays were carried out with BoNT/A (6 pg). The indicated concentrations of A8-^{ci}BoNT/XD were injected into the same muscle 18 h later. DAS scores were recorded and plotted over time. (vehicle and A8-^{ci}BoNT/XD at 60 μg, n=8; A8-^{ci}BoNT/XA at 6 μg; n=3).

[0062] FIGS. 12A-12B show production of ^{ci}BoNT/C and A8-^{ci}BoNT/C. (FIG. 12A) Schematic drawing of A8-^{ci}BoNT/C fusion protein. (FIG. 12B) ^{ci}BoNT/C and A8-^{ci}BoNT/C were expressed and purified as His6-tagged proteins in E. coli, activated by thrombin, and analyzed by SDS-PAGE gels with or without DTT.

[0063] FIGS. 13A-13D show generating active BoNT/XA, A8-BoNT/XA, and A8-J10-BoNT/XA using sortase-mediated ligation. (FIG. 13A) Schematic drawing of sortase-mediated ligation to generate BoNT/XA, A8-BoNT/XA, and A8-J10-BoNT/XA containing the active form of LC/X. (FIG. 13B) The active form of BoNT/XA and A8-BoNT/XA were generated via sortase-mediated ligation and analyzed on SDS-PAGE gels. One of three independent experiments is shown. (FIG. 13C) The indicated concentrations of LCH_{N}/X, A8-LCH_{N}/X, and A8-J10-LCH_{N}/X were activated with thrombin and then incubated with recombinantly purified GST-tagged VAMP2 in the presence of DTT. Cleavage of VAMP2 was analyzed by SDS-PAGE gels and Coomassie blue staining. Fusion with nanobodies did not affect cleavage of VAMP2 by LC/X. (FIG. 13D) The active form of A8-J10-BoNT/XA was generated via sortase-mediated ligation and analyzed on SDS-PAGE gels. The arrows indicate the ligated full-length toxins. One of three independent experiments is shown.

[0064] FIGS. 14A-14B show A8-^{ci}BoNT/XA utilizes the same receptors to target neurons as BoNT/A. (FIG. 14A) A8-^{ci}BoNT/XA and ^{ci}BoNT/A were pre-incubated with GST-tagged the 4^{th} luminal domain of SV2C (SV2C-L4), and then applied to cultured rat cortical neurons for 8 min in culture medium. Neurons were washed, fixed, and subjected to immunostaining to detect A8-^{ci}BoNT/XA and ^{ci}BoNT/A using a human monoclonal antibody (RAZ-1) that recognizes BoNT/A-Hc. Synapsin was detected as a marker for synaptic terminals. Pre-incubation with SV2C-L4 reduced binding of both A8-^{ci}BoNT/XA and ^{ci}BoNT/A to neurons. One of two independent experiments is shown. (FIG. 14B) BoNT/A (20 pM) was pre-incubated with either A8 or ^{ci}BoNT/XA (50 nM). The mixture was then added to the medium and exposed to cultured rat cortical neurons. Cell lysates were analyzed by immunoblot to detect SNAP-25 and actin. Pre-incubation with A8 did not affect cleavage of SNAP-25, indicating that A8 is incapable of inhibiting toxins prior to its entry into neurons. ^{ci}BoNT/XA was able to reduce cleavage of SNAP-25 when applied at the same time as BoNT/A, suggesting that it can compete with BoNT/A for binding to neurons. One of two independent experiments is shown.

[0065] FIGS. 15A-15E show A8-^{ci}BoNT/XA reduced BoNT/A-induced local leg muscle paralysis in vivo. (FIG. 15A) Experiments were carried out as described in FIG. 8B. The representative images of mice are presented to show that A8-^{ci}BoNT/XA allowed complete recovery of toe spreading by day 3, while injection of A8 or ^{ci}BoNT/XA alone did not reduce paralysis. (FIG. 15B) DAS assays were carried out using BoNT/B (3.5 pg). A8-^{ci}BoNT/XA was injected 18 h later into the same muscle. DAS scores were recorded and plotted over time (right panel) and representative images on day 3 are shown in the left panel. A8-^{ci}BoNT/XA did not affect BoNT/B-induced paralysis. Data are pooled from two independent experiments (n=10 each group). (FIG. 15C) The indicated mixture of A8 and ^{ci}BoNT/XA were injected as controls for experiments described in FIG. 8D (n=8). (FIG. 15D) The indicated mixture of A8 and ^{ci}BoNT/XA were injected as controls for experiments described in FIG. 8E (vehicle, n=18; A8 (6 μg)/^{ci}BoNT/XA (54 μg), n=10; A8 (60 μg)/^{ci}BoNT/XA (540 μg), n=8). (FIG. 15E) The indicated mixture of A8 and ^{ci}BoNT/XA were injected as controls for experiments described in FIG. 8F (vehicle, n=9; A8 (0.6 μg)/^{ci}BoNT/XA (5.4 μg), n=8).

[0066] FIGS. 16A-16E show characterization of A8-J10-^{ci}BoNT/XA in vitro and on cultured neurons. (FIG. 16A) A8-J10-^{ci}BoNT/XA was expressed and purified from E. coli, activated by thrombin, and analyzed on SDS-PAGE gels with or without DTT. (FIG. 16B) LC/B was incubated with BDE in the presence of A8-J10-^{ci}BoNT/XA or A8-J10. Cleavage of VAMP2 by LC/B was analyzed by immunoblot. A8-J10-^{ci}BoNT/XA and A8-J10 inhibited LC/B activity to a similar degree. One of two independent experiments is shown. (FIG. 16C) LC/A was incubated with BDE in the presence of A8-J10, A8-^{ci}BoNT/XA, or A8-J10-^{ci}BoNT/XA. Cleavage of SNAP-25 by LC/A was analyzed by immunoblot. A8-J10-^{ci}BoNT/XA and A8-J10 inhibited LC/A activity to a similar degree. One of two independent experiments is shown. (FIG. 16D) Active forms of BoNT/XA, A8-BoNT/XA, and A8-J10-BoNT/XA were generated via sortase-mediated ligation of the LCH_{N}/X, A8-LCH_{N}/X, or A8-J10-LCH_{N}/X with Hc/A. Cultured rat cortical neurons were exposed to these toxins, and cleavage of VAMP2 was analyzed by immunoblot. SNAP-25 served as a loading control. A8-J10-BoNT/XA and A8-BoNT/XA delivered the LC/X into neurons with similar efficacy. One of three independent experiments is shown. (FIG. 16E) Cultured cortical neurons were exposed to BoNT/A for 12 h, washed, and further incubated with toxin-free medium for 24 h. A8-^{ci}BoNT/XA or A8-J10-^{ci}BoNT/XA was then added to the medium for 48 h. Neuro lysates were harvested and analyzed by immunoblot to detect the three SNARE proteins and actin. Adding A8-J10-^{ci}BoNT/XA or A8-^{ci}BoNT/XA both reduced cleavage of SNAP-25, with A8-^{ci}BoNT/XA showing more protection of SNAP-25 than A8-J10-^{ci}BoNT/XA. One of three independent experiments is shown.

[0067] FIG. 17 shows in vivo toxicity analysis of the indicated proteins. The indicated proteins were purified from E. coli with endotoxin removed. They were injected IP into mice. Surviving mice were observed for 21 days.

[0068] FIG. 18 shows clinical scores for botulism in mice. The humane endpoint is defined as a combined clinical score (from all categories) 5.

[0069] FIG. 19 shows schematic illustration of the indicated constructs.

[0070] FIGS. 20A-20E show delivery of two nanobodies (J10-A8) using ^{ci}BoNT/XA for post-exposure treatment of BoNT/A and BoNT/B intoxication. (FIG. 20A) Schematic drawing of ^{ci}BoNT/XA with two nanobodies (J10 and A8) fused to its N-terminus. The fusion protein is termed J10-A8-^{ci}BoNT/XA. (FIG. 20B) DAS assays were carried out with BoNT/A (6 pg). The indicated concentrations of J10-A8-^{ci}BoNT/XA were injected into the same leg muscle 18 h later. Representative image showing that J10-A8-^{ci}BoNT/XA treatment shortened the duration of muscle paralysis induced by BoNT/A. (FIG. 20C) DAS assays were carried out with BoNT/A (6 pg) and the indicated concentrations of J10-A8-^{ci}BoNT/XA were injected into the same leg muscle 18 h later. DAS scores were plotted over time. (FIG. 20D) DAS assays were carried out with BoNT/B (3.5 pg). The indicated concentrations of J10-A8-^{ci}BoNT/XA were injected into the same leg muscle 18 h later. Representative image showing that J10-A8-^{ci}BoNT/XA treatment shortened the duration of muscle paralysis induced by BoNT/B. (FIG. 20E) DAS assays were carried out with BoNT/B (3.5 pg) and the indicated concentrations of J10-A8-^{ci}BoNT/XA were injected into the same leg muscle 18 h later. DAS scores were plotted over time.

[0071] FIGS. 21A-21B show neutralization activity of A8-^{ci}BoNT/PMP1-A via IM injection in vivo in mouse. (FIG. 21A) Schematic drawing of ^{ci}BoNT/PMP1-A with A8 fused to its N-terminus. The fusion protein is termed A8-^{ci}BoNT/PmA. (FIG. 21B) 6 pg of BoNT/A were injected in mouse hind limb muscle. After 18 hours, the mice showed paralysis (DAS score 2-3). The indicated concentrations of A8-^{ci}BoNT/PmA or A8-^{ci}BoNT/XA were injected in the same muscle and DAS score were recorded over time.

### DETAILED DESCRIPTION OF CERTAIN EMBODIMENTS

[0072] Clostridium Botulinum neurotoxins (BoNTs) are a family of bacterial toxins produced by clostridium bacteria, with seven well-established serotypes (BoNT/A-G). Recently a new BoNT serotype, serotype H (BoNT/H) has been reported (e.g., as described in Maslanka et al., J Infect Dis. 2016 Feb. 1; 213(3):379-85, incorporated herein by reference). BoNTs are one of the most dangerous potential bio-terrorism agents, classified as a “Category A” select agent by Center for Disease Control (CDC) of United States. These toxins are produced as a single polypeptide and can be separated by bacterial or host proteases into a light chain (LC, ˜50 kDa) and a heavy chain (H_{C}, ˜100 kDa). The two chains remain connected via an inter-chain disulfide bond. The H_{c} contains two sub-domains: the N-terminal H_{N} domain that mediates translocation of the LC across endosomal membranes, and the C-terminal Hc domain that mediates binding to receptors on neurons. The inter-chain disulfide bond is reduced once the LC translocates into the cytosol. Released LC acts as a protease to specifically cleave a set of neuronal proteins: BoNT/A, C, and E cleave at distinct sites on a protein known as SNAP-25; BoNT/B, D, F, and G cleave at different sites on a vesicle protein VAMP; and BoNT/C also cleaves a transmembrane protein syntaxin 1. These three proteins form a complex, known as SNARE complex, which is essential for release of neurotransmitters. Cleavage of any one of these three SNARE proteins blocks neurotransmitters release from neurons, thus paralyzing muscles.

[0073] BoNTs are the most potent toxins known and cause the human and animal disease known as botulism. The major form of botulism is caused by ingesting food contaminated with BoNTs (food botulism). Other forms also exist such as infant botulism, which is due to colonization of the intestine by toxin-producing bacteria in infants.

[0074] Because local injections of minute amounts of toxins can attenuate neuronal activity in targeted regions, BoNTs have been used to treat a growing list of medical conditions, including muscle spasms, chronic pain, overactive bladder problems, as well as for cosmetic applications. The market for BoNTs has already surpassed $1.5 billion in 2011 and is projected to reach 2.9 billion by 2018.

[0075] Clostridium botulinum neurotoxin (BoNT)-based delivery system have been previously developed and showed to be able to deliver proteins into neurons (e.g., as described in Bade et al., J Neurochem 91, 1461-1472, 2004, incorporated herein by reference). To serve as a delivery tool, BoNTs must be “de-toxified” by introducing point mutations into its protease domain (light chain) to abolish its protease activity inside neurons. However, currently reported “inactive” form of BoNTs still showed a level of toxicity when injected into mice, causing paralysis and even death of mice (e.g., as shown in Vazquez-Cintron et al., Sci Rep 7, 42923, 2017 and Webb et al., Toxins (Basel) 9, 2017, incorporated herein by reference). While the reason for the residual toxicity remains unknown, it is a major barrier for developing a useful delivery system using catalytically inactive BoNTs.

[0076] It was surprisingly found herein that, two recently discovered new BoNT-like toxins, one from Clostridium botulinum, designated serotype X (BoNT/X, as described in described in Zhang et al., Nat Commun 8, 14130, 2017, incorporated herein by reference) and one from Enterococcus faecium (BoNT/En, as described in as described in Zhang et al., Cell Host Microbe 23, 169-176 e166, 2018, incorporated herein by reference) overcome the residual toxicity challenge posed by traditional BoNT-based delivery systems. Additionally, another recently discovered new BoNT-like toxin from Paraclostridium bifermentans herein termed BoNT/PMP1 (e.g., as described in Contraras et al., Nature Communications volume 10, Article number: 2869 (2019), incorporated herein by reference) can also be used as a delivery vehicle described herein without residual toxicity issues.

[0077] It was demonstrated herein that, in contrast to delivery tools based on traditional BoNTs (BoNT/A-H), catalytically inactive BoNT/X (as well as fragments or chimeric toxins derived from BoNT/X such as catalytically inactive BoNT/XA) showed no detectable toxicity in vivo in mouse models, thus representing a safe and effective delivery system for delivering cargo/therapeutics into cells (e.g., neurons). Two other BoNT-like neurotoxins that are highly similar to BoNT/X, BoNT/En and BoNT/PMP1 are expected also have no toxicity in vivo in their inactive form. Accordingly, the present disclosure, in some aspects, provide catalytically inactive botulinum neurotoxin-like toxins from Clostridium botulinum, serotype X (BoNT/X), from Enterococcus faecium (BoNT/En), or from Paraclostridium bifermentans (BoNT/PMP1) and their uses as delivery vehicles to deliver agents (e.g., therapeutic agents or diagnostic agents) to a cell (e.g., a neuron).

[0078] A “Clostridium Botulinum neurotoxin (BoNT),” as used herein encompasses broadly any BoNT polypeptides, variants, or fragments from Clostridium botulinum (e.g., from Clostridium botulinum serotypes A, B, C, D, E, F, G, and H). In some embodiments, the term BoNT also encompasses a BoNT-like toxin from Clostridium botulinum serotype X (BoNT/X), a BoNT-like toxin from Enterococcus faecium (BoNT/En), or a BoNT-like toxin from Paraclostridium bifermentans (BoNT/PMP1) and variants and fragments thereof.

[0079] In some embodiments, a BoNT refers to a full-length BoNT. A full-length BoNT comprises a light chain (LC) and a heavy chain (HC). The light chain of a BoNT comprises the protease domain, and the heavy chain of a BoNT contains a translocation domain at the N-terminus and a receptor binding domain at the C-terminus. The heavy chain and light chain are translated as a single polypeptide chain, wherein the LC and the HC are linked via a linker region. The linker region is cleaved by a protease and the LC and HC remain linked via a disulfide bond between two cysteine residues, producing a mature BoNT or BoNT-like toxin. In some embodiments, a BoNT refers to a fragment of a full length BoNT, e.g., a BoNT fragment that comprises only the LC (protease domain), a BoNT fragment that comprises the LC (protease domain) and the N-terminus of the HC (referred to herein as “LC-Hn”), or a BoNT fragment that comprises the C-terminus of the HC (receptor binding domain, referred to herein as “Hc”).

[0080] “BoNT/X” refers to a BoNT-like toxin from Clostridium botulinum, serotype X. BoNT/X has been described in Zhang et al., Nat Commun 8, 14130, 2017, incorporated herein by reference. The full length BoNT/X wild type protein sequence (GenBank No. BAQ12790.1) is provided in Table 2 as SEQ ID NO: 1.

[0081] “BoNT/En” refers to a BoNT-like toxin from Enterococcus faecium. BoNT/En has been described in Zhang et al., Cell Host Microbe 23, 169-176 e166, 2018, incorporated herein by reference. The full length BoNT/En wild type protein sequence (GenBank No. OTO22244.1) is provided in Table 2 as SEQ ID NO: 2.

[0082] “BoNT/PMP1” refers to a BoNT-like toxin from Paraclostridium bifermentans. PMP1 is also referred to in short as “Pm” in some of the figures and examples. Similarly, BoNT/PMP1 is also referred to as “BoNT/Pm” herein. BoNT/PMP1 has been described in Contraras et al., Nature Communications volume 10, Article number: 2869 (2019), incorporated herein by reference. The full length BoNT/PMP1 wild type protein sequence is provided in Table 2 as SEQ ID NO: 85.

[0083] The light chain of a BoNT (e.g., a BoNT-like toxin such as BoNT/X, BoNT/EN or BoNT/PMP1) comprises a protease domain, which cleaves natural BoNT substrates (e.g., certain SNARE proteins and VAMP proteins). The protease domain or the LC of BoNT/X is considered to correspond to about amino acid 1-439 of full length BoNT/X as set forth in SEQ ID NO: 1. The domain boundary may vary by about 25 amino acids. For example, the protease domain of BoNT/X may correspond to amino acids 1-414 or 1-464 of full length BoNT/X as set forth in SEQ ID NO: 1. In some embodiments, the protease domain corresponds to amino acids 1-414, 1-415, 1-416, 1-417, 1-418, 1-419, 1-420, 1-421, 1-422, 1-423, 1-424, 1-425, 1-426, 1-427, 1-428, 1-429, 1-430, 1-431, 1-432, 1-433, 1-434, 1-435, 1-436, 1-437, 1-438, 1-439, 1-440, 1-441, 1-442, 1-443, 1-444, 1-445, 1-446, 1-447, 1-448, 1-449, 1-450, 1-451, 1-452, 1-453, 1-454, 1-455, 1-456, 1-457, 1-458, 1-459, 1-460, 1-461, 1-462, 1-463, or 1-464 of full length BoNT/X as set forth in SEQ ID NO: 1. In some embodiments, the protease domain of BoNT/X corresponds to amino acids 1-422 of full-length BoNT/X as set forth in SEQ ID NO: 1.

[0084] The protease domain or the LC of BoNT/En corresponds to about amino acid 1-423 of full length BoNT/En as set forth in SEQ ID NO: 2. The domain boundary may vary by about 25 amino acids. For example, the protease domain corresponds to amino acids 1-398 or 1-448 of full length BoNT/En as set forth in SEQ ID NO: 2. In some embodiments, the protease domain may correspond to amino acids 1-398, 1-399, 1-400, 1-401, 1-402, 1-403, 1-404, 1-405, 1-406, 1-407, 1-408, 1-409, 1-410, 1-411, 1-412, 1-413, 1-414, 1-415, 1-416, 1-417, 1-418, 1-419, 1-420, 1-421, 1-422, 1-423, 1-424, 1-425, 1-426, 1-427, 1-428, 1-429, 1-430, 1-431, 1-432, 1-433, 1-434, 1-435, 1-436, 1-437, 1-438, 1-439, 1-440, 1-441, 1-442, 1-443, 1-444, 1-445, 1-446, 1-447, or 1-448 of full length BoNT/En as set forth in SEQ ID NO: 2. In some embodiments, the protease domain of BoNT/En corresponds to amino acids 1-423 of full length BoNT/En as set forth in SEQ ID NO: 2.

[0085] The protease domain or the LC of BoNT/PMP1 corresponds to about amino acid 1-394 of full length BoNT/PMP1 as set forth in SEQ ID NO: 85. The domain boundary may vary by about 25 amino acids. For example, the protease domain corresponds to amino acids 1-369 or 1-419 of full length BoNT/PMP1 as set forth in SEQ ID NO: 85. In some embodiments, the protease domain may correspond to amino acids 1-369, 1-370, 1-371, 1-372, 1-373, 1-374, 1-375, 1-376, 1-377, 1-378, 1-379, 1-380, 1-381, 1-382, 1-383, 1-384, 1-385, 1-386, 1-387, 1-388, 1-389, 1-390, 1-391, 1-392, 1-393, 1-394, 1-395, 1-396, 1-397, 1-398, 1-399, 1-400, 1-401, 1-402, 1-403, 1-404, 1-405, 1-406, 1-407, 1-408, 1-409, 1-410, 1-411, 1-412, 1-413, 1-414, 1-415, 1-416, 1-417, 1-418, or 1-419 of full length BoNT/PMP1 as set forth in SEQ ID NO: 85. In some embodiments, the protease domain of BoNT/PMP1 corresponds to amino acids 1-394 of full length BoNT/PMP1 as set forth in SEQ ID NO: 85.

[0086] A “catalytically inactive BoNT,” refers to a provide modified BoNT polypeptide comprising an inactive protease domain. Catalytically inactive BoNT polypeptides cannot cleave BoNT substrate proteins (e.g., a SNARE protein) due to the inactivation of the protease domain. In some embodiments, a catalytically inactive BoNT is a full length BoNT that is catalytically inactive or a BoNT fragment (e.g., the LC or LC-Hn fragment) that is catalytically inactive. In some embodiments, a catalytically inactive BoNT is a chimeric BoNT comprising a catalytically inactive LC-Hn fused to a receptor binding domain (Hc) from a different BoNT serotype or a BoNT from a different bacterial species.

[0087] In some embodiments, the catalytically inactive BoNT is an engineered chimeric BoNT comprising (a) a light chain comprising an inactive protease domain, and (b) a heavy chain comprising: (i) a translocation domain, and (ii) a receptor binding domain, wherein (a) and (b)(i) are from a BoNT/X, from a BoNT/En, or from a BoNT/PMP1, and wherein (b)(ii) is from a BoNT in Clostridium botulinum, serotype A, B, C, D, E, F, G or H (i.e., BoNT/A, BoNT/B, BoNT/C, BoNT/D, BoNT/E, BoNT/F, BoNT/G, or BoNT/H). It is to be understood that when a BoNT serotype is referred to herein (e.g., BoNT/A), all sub-types of the serotype (e.g., BoNT/A1, BoNT/A2, BoNT/A3, BoNT/A4, BoNT/A5, BoNT/A7, or BoNT/A8) is contemplated. All subtypes of BoNT/B, BoNT/C, BoNT/D, BoNT/E, BoNT/F, BoNT/G, or BoNT/H are also encompassed by the present disclosure. In some embodiments, the chimeric BoNT of the present disclosure comprises a light chain comprising an inactive protease domain of BoNT/X or BoNT/En, and a heavy chain comprising a translocation domain of BoNT/X or BoNT/En and a receptor binding domain of any one of BoNT/A, BoNT/B, BoNT/C, BoNT/D, BoNT/E, BoNT/F, BoNT/G, and BoNT/H.

[0088] In some embodiments, the catalytically inactive BoNT is a catalytically inactive BoNT/X. In some embodiments, the catalytically inactive BoNT/X is a catalytically inactive BoNT/X fragment comprising a catalytically inactive protease domain and a translocation domain (herein referred to as ^{ci}LC-Hn/X). In some embodiments, the catalytically inactive BoNT/X is a chimeric BoNT comprises a catalytically inactive LC-Hn/X and a Hc from a BoNT in Clostridium botulinum, serotype A, B, C, D, E, F, G or H (herein referred to as Hc/A, Hc/B, Hc/C, Hc/D, Hc/E, Hc/F, Hc/G, or Hc/F, respectively). Such chimeric BoNTs are referred to herein as ^{ci}BoNT/XA, ^{ci}BoNT/XB, ^{ci}BoNT/XC, ^{ci}BoNT/XD, ^{ci}BoNT/XE, ^{ci}BoNT/XF, ^{ci}BoNT/XG, or ^{ci}BoNT/XH, respectively. It is to be understood that the ^{ci}BoNT/XA, ^{ci}BoNT/XB, ^{ci}BoNT/XC, ^{ci}BoNT/XD, ^{ci}BoNT/XE, ^{ci}BoNT/XF, ^{ci}BoNT/XG, or ^{ci}BoNT/XH encompasses chimeric BoNTs comprising receptor binding domains from any subtypes of BoNT/A, BoNT/B, BoNT/C, BoNT/D, BoNT/E, BoNT/F, BoNT/G, or BoNT/H.

[0089] In some embodiments, the inactive protease domain of the catalytically inactive BoNT described herein (e.g., ^{ci}LC-Hn/X, ^{ci}BoNT/XA, ^{ci}BoNT/XB, ^{ci}BoNT/XC, ^{ci}BoNT/XD, ^{ci}BoNT/XE, ^{ci}BoNT/XF, ^{ci}BoNT/XG, or ^{ci}BoNT/XH) comprises one or more (e.g., 1, 2, 3, 4, 5) substitution mutation(s) in a position corresponding to R360, Y363, H227, E228, or H231 in SEQ ID NO: 1. In some embodiments, the inactive protease domain of the catalytically inactive BoNT described herein (e.g., ^{ci}LC-Hn/X, ^{ci}BoNT/XA, ^{ci}BoNT/XB, ^{ci}BoNT/XC, ^{ci}BoNT/XD, ^{ci}BoNT/XE, ^{ci}BoNT/XF, ^{ci}BoNT/XG, or ^{ci}BoNT/XH) comprises three amino acid substitutions in a position corresponding to E228, R360, and Y363 in SEQ ID NO: 1. In some embodiments, the inactive protease domain of the catalytically inactive BoNT described herein (e.g., ^{ci}LC-Hn/X, ^{ci}BoNT/XA, ^{ci}BoNT/XB, ^{ci}BoNT/XC, ^{ci}BoNT/XD, ^{ci}BoNT/XE, ^{ci}BoNT/XF, ^{ci}BoNT/XG, or ^{ci}BoNT/XH) comprises amino acid substitutions corresponding to E228Q, R360A, and Y363F in SEQ ID NO: 1.

[0090] In some embodiments, the catalytically inactive BoNT is a ^{ci}LC-Hn/X comprising an amino acid sequence that is at least 80%, at least 81%, at least 82%, at least 83%, at least 84%, at least 85%, at least 86%, at least 87%, at least 88%, at least 89%, at least 90%, at least 91%, at least 92%, at least 93%, at least 94%, at least 95%, at least 96%, at least 97%, at least 98%, at least 99%, or at least 99.5% identical to the amino acid sequence of SEQ ID NO: 3 and comprises one or more substitution mutation(s) in a position corresponding to R360, Y363, H227, E228, or H231 in SEQ ID NO: 1. In some embodiments, the catalytically inactive BoNT is a ^{ci}LC-Hn/X comprising an amino acid sequence that is at least 80%, at least 81%, at least 82%, at least 83%, at least 84%, at least 85%, at least 86%, at least 87%, at least 88%, at least 89%, at least 90%, at least 91%, at least 92%, at least 93%, at least 94%, at least 95%, at least 96%, at least 97%, at least 98%, at least 99%, or at least 99.5% identical to the amino acid sequence of SEQ ID NO: 3 and comprises amino acid substitutions corresponding to E228Q, R360A, and Y363F in SEQ ID NO: 1. In some embodiments, the catalytically inactive BoNT is a ^{ci}LC-Hn/X comprising the amino acid sequence of SEQ ID NO: 3. In some embodiments, the catalytically inactive BoNT is a ^{ci}LC-Hn/X consisting of the amino acid sequence of SEQ ID NO: 3.

[0091] In some embodiments, the catalytically inactive BoNT is a chimeric BoNT (e.g., ^{ci}BoNT/XA, ^{ci}BoNT/XB, ^{ci}BoNT/XC, ^{ci}BoNT/XD, ^{ci}BoNT/XE, ^{ci}BoNT/XF, ^{ci}BoNT/XG, or ^{ci}BoNT/XH) comprising an amino acid sequence that is at least 80%, at least 81%, at least 82%, at least 83%, at least 84%, at least 85%, at least 86%, at least 87%, at least 88%, at least 89%, at least 90%, at least 91%, at least 92%, at least 93%, at least 94%, at least 95%, at least 96%, at least 97%, at least 98%, at least 99%, or at least 99.5% identical to the amino acid sequence of any one of SEQ ID NOs: 5-12 and comprises one or more substitution mutation(s) in a position corresponding to R360, Y363, H227, E228, or H231 in SEQ ID NO: 1. In some embodiments, the catalytically inactive BoNT is a chimeric BoNT (e.g., ^{ci}BoNT/XA, ^{ci}BoNT/XB, ^{ci}BoNT/XC, ^{ci}BoNT/XD, ^{ci}BoNT/XE, ^{ci}BoNT/XF, ^{ci}BoNT/XG, or ^{ci}BoNT/XH) comprising an amino acid sequence that is at least 80%, at least 81%, at least 82%, at least 83%, at least 84%, at least 85%, at least 86%, at least 87%, at least 88%, at least 89%, at least 90%, at least 91%, at least 92%, at least 93%, at least 94%, at least 95%, at least 96%, at least 97%, at least 98%, at least 99%, or at least 99.5% identical to the amino acid sequence of any one of SEQ ID NOs: 5-12 and comprises amino acid substitutions corresponding to E228Q, R360A, and Y363F in SEQ ID NO: 1. In some embodiments, the catalytically inactive BoNT is a chimeric BoNT (e.g., ^{ci}BoNT/XA, ^{ci}BoNT/XB, ^{ci}BoNT/XC, ^{ci}BoNT/XD, ^{ci}BoNT/XE, ^{ci}BoNT/XF, ^{ci}BoNT/XG, or ^{ci}BoNT/XH) comprising the amino acid sequence of any one of SEQ ID NOs: 5-12. In some embodiments, the catalytically inactive BoNT is a chimeric BoNT (e.g., ^{ci}BoNT/XA, ^{ci}BoNT/XB, ^{ci}BoNT/XC, ^{ci}BoNT/XD, ^{ci}BoNT/XE, ^{ci}BoNT/XF, ^{ci}BoNT/XG, or ^{ci}BoNT/XH) consisting of the amino acid sequence of any one of SEQ ID NOs: 5-12.

[0092] In some embodiments, the catalytically inactive BoNT is a catalytically inactive BoNT/En. In some embodiments, the catalytically inactive BoNT/En is a catalytically inactive BoNT/En fragment comprising a catalytically inactive protease domain and a translocation domain (herein referred to as a ^{ci}LC-Hn/En). In some embodiments, the catalytically inactive BoNT/En is a chimeric BoNT comprises a catalytically inactive LC-Hn/En and a Hc from a BoNT in Clostridium botulinum, serotype A, B, C, D, E, F, G or H (herein referred to as Hc/A, Hc/B, Hc/C, Hc/D, Hc/E, Hc/F, Hc/G, or Hc/F, respectively). Such chimeric BoNTs are referred to herein as ^{ci}BoNT/EnA, ^{ci}BoNT/EnB, ^{ci}BoNT/EnC, ^{ci}BoNT/EnD, ^{ci}BoNT/EnE, ^{ci}BoNT/EnF, ^{ci}BoNT/EnG, or ^{ci}BoNT/EnH, respectively. It is to be understood that the ^{ci}BoNT/EnA, ^{ci}BoNT/EnB, ^{ci}BoNT/EnC, ^{ci}BoNT/EnD, ^{ci}BoNT/EnE, ^{ci}BoNT/EnF, ^{ci}BoNT/EnG, or ^{ci}BoNT/EnH encompasses chimeric BoNTs comprising receptor binding domains from any subtypes of BoNT/A, BoNT/B, BoNT/C, BoNT/D, BoNT/E, BoNT/F, BoNT/G, or BoNT/H.

[0093] In some embodiments, the inactive protease domain of the catalytically inactive BoNT described herein (e.g., ^{ci}LC-Hn/En, as ^{ci}BoNT/EnA, ^{ci}BoNT/EnB, ^{ci}BoNT/EnC, ^{ci}BoNT/EnD, ^{ci}BoNT/EnE, ^{ci}BoNT/EnF, ^{ci}BoNT/EnG, or ^{ci}BoNT/EnH) comprises one or more (e.g., 1, 2, or 3) substitution mutation(s) in a position corresponding to H225, E226, H229, R364, or Y367 in SEQ ID NO: 2. In some embodiments, the inactive protease domain of the catalytically inactive BoNT described herein (e.g., ^{ci}LC-Hn/En, as ^{ci}BoNT/EnA, ^{ci}BoNT/EnB, ^{ci}BoNT/EnC, ^{ci}BoNT/EnD, ^{ci}BoNT/EnE, ^{ci}BoNT/EnF, ^{ci}BoNT/EnG, or ^{ci}BoNT/EnH) comprises three amino acid substitutions in a position corresponding to E226, R364, or Y367 in SEQ ID NO: 2. In some embodiments, the inactive protease domain of the catalytically inactive BoNT described herein (e.g., ^{ci}LC-Hn/En, as ^{ci}BoNT/EnA, ^{ci}BoNT/EnB, ^{ci}BoNT/EnC, ^{ci}BoNT/EnD, ^{ci}BoNT/EnE, ^{ci}BoNT/EnF, ^{ci}BoNT/EnG, or ^{ci}BoNT/EnH) comprises amino acid substitutions corresponding to E226Q, R364A, and Y367F in SEQ ID NO: 2.

[0094] In some embodiments, the catalytically inactive BoNT is a ^{ci}LC-Hn/En comprising an amino acid sequence that is at least 80%, at least 81%, at least 82%, at least 83%, at least 84%, at least 85%, at least 86%, at least 87%, at least 88%, at least 89%, at least 90%, at least 91%, at least 92%, at least 93%, at least 94%, at least 95%, at least 96%, at least 97%, at least 98%, at least 99%, or at least 99.5% identical to the amino acid sequence of SEQ ID NO: 4 and comprises one or more substitution mutation(s) in a position corresponding to H225, E226, H229, R364, or Y367 in SEQ ID NO: 2. In some embodiments, the catalytically inactive BoNT is a ^{ci}LC-Hn/En comprising an amino acid sequence that is at least 80%, at least 81%, at least 82%, at least 83%, at least 84%, at least 85%, at least 86%, at least 87%, at least 88%, at least 89%, at least 90%, at least 91%, at least 92%, at least 93%, at least 94%, at least 95%, at least 96%, at least 97%, at least 98%, at least 99%, or at least 99.5% identical to the amino acid sequence of SEQ ID NO: 4 and comprises amino acid substitutions corresponding to E226Q, R364A, and Y367F in SEQ ID NO: 2. In some embodiments, the catalytically inactive BoNT is a ^{ci}LC-Hn/En comprising the amino acid sequence of SEQ ID NO: 4. In some embodiments, the catalytically inactive BoNT is a ^{ci}LC-Hn/En consisting of the amino acid sequence of SEQ ID NO: 4. In some embodiments, the catalytically inactive BoNT is a chimeric BoNT (e.g., ^{ci}BoNT/EnA, ^{ci}BoNT/EnB, ^{ci}BoNT/EnC, ^{ci}BoNT/EnD, ^{ci}BoNT/EnE, ^{ci}BoNT/EnF, ^{ci}BoNT/EnG, or ^{ci}BoNT/EnH) comprising an amino acid sequence that is at least 80%, at least 81%, at least 82%, at least 83%, at least 84%, at least 85%, at least 86%, at least 87%, at least 88%, at least 89%, at least 90%, at least 91%, at least 92%, at least 93%, at least 94%, at least 95%, at least 96%, at least 97%, at least 98%, at least 99%, or at least 99.5% identical to the amino acid sequence of any one of SEQ ID NOs: 13-20 and comprises one or more substitution mutation(s) in a position corresponding to H225, E226, H229, R364, or Y367 in SEQ ID NO: 2. In some embodiments, the catalytically inactive BoNT is a chimeric BoNT (e.g., ^{ci}BoNT/EnA, ^{ci}BoNT/EnB, ^{ci}BoNT/EnC, ^{ci}BoNT/EnD, ^{ci}BoNT/EnE, ^{ci}BoNT/EnF, ^{ci}BoNT/EnG, or ^{ci}BoNT/EnH) comprising an amino acid sequence that is at least 80%, at least 81%, at least 82%, at least 83%, at least 84%, at least 85%, at least 86%, at least 87%, at least 88%, at least 89%, at least 90%, at least 91%, at least 92%, at least 93%, at least 94%, at least 95%, at least 96%, at least 97%, at least 98%, at least 99%, or at least 99.5% identical to the amino acid sequence of any one of SEQ ID NOs: 13-20 and comprises amino acid substitutions corresponding to E226Q, R364A, and Y367F in SEQ ID NO: 2. In some embodiments, the catalytically inactive BoNT is a chimeric BoNT (e.g., ^{ci}BoNT/EnA, ^{ci}BoNT/EnB, ^{ci}BoNT/EnC, ^{ci}BoNT/EnD, ^{ci}BoNT/EnE, ^{ci}BoNT/EnF, ^{ci}BoNT/EnG, or ^{ci}BoNT/EnH) comprising the amino acid sequence of any one of SEQ ID NOs: 13-20. In some embodiments, the catalytically inactive BoNT is a chimeric BoNT (e.g., ^{ci}BoNT/EnA, ^{ci}BoNT/EnB, ^{ci}BoNT/EnC, ^{ci}BoNT/EnD, ^{ci}BoNT/EnE, ^{ci}BoNT/EnF, ^{ci}BoNT/EnG, or ^{ci}BoNT/EnH) consisting of the amino acid sequence of any one of SEQ ID NOs: 13-20.

[0095] In some embodiments, the catalytically inactive BoNT is a catalytically inactive BoNT/PMP1. In some embodiments, the catalytically inactive BoNT/PMP1 is a catalytically inactive BoNT/PMP1 fragment comprising a catalytically inactive protease domain and a translocation domain (herein referred to as ^{ci}LC-Hn/PMP1). In some embodiments, the catalytically inactive BoNT/PMP1 is a chimeric BoNT comprising a catalytically inactive LC-Hn/PMP1 and a Hc from a BoNT in Clostridium botulinum, serotype A, B, C, D, E, F, G or H (herein referred to as Hc/A, Hc/B, Hc/C, Hc/D, Hc/E, Hc/F, Hc/G, or Hc/F, respectively). Such chimeric BoNTs are referred to herein as ^{ci}BoNT/PMP1A, ^{ci}BoNT/PMP1B, ^{ci}BoNT/PMP1C, ^{ci}BoNT/PMP1D, ^{ci}BoNT/PMP1E, ^{ci}BoNT/PMP1F, ^{ci}BoNT/PMP1G, or ^{ci}BoNT/PMP1H, respectively. It is to be understood that the ^{ci}BoNT/PMP1A, ^{ci}BoNT/PMP1B, ^{ci}BoNT/PMP1C, ^{ci}BoNT/PMP1D, ^{ci}BoNT/PMP1E, ^{ci}BoNT/PMP1F, ^{ci}BoNT/PMP1G, or ^{ci}BoNT/PMP1H encompasses chimeric BoNTs comprising receptor binding domains from any subtypes of BoNT/A, BoNT/B, BoNT/C, BoNT/D, BoNT/E, BoNT/F, BoNT/G, or BoNT/H.

[0096] In some embodiments, the inactive protease domain of the catalytically inactive BoNT described herein (e.g., ^{ci}LC-Hn/PMP1, ^{ci}BoNT/PMP1A, ^{ci}BoNT/PMP1B, ^{ci}BoNT/PMP1C, ^{ci}BoNT/PMP1D, ^{ci}BoNT/PMP1E, ^{ci}BoNT/PMP1F, ^{ci}BoNT/PMP1G, or ^{ci}BoNT/PMP1H) comprises one or more (e.g., 1, 2, 3, 4, 5) substitution mutation(s) in a position corresponding to H208, E209, H212, R344, or Y347 in SEQ ID NO: 85. In some embodiments, the inactive protease domain of the catalytically inactive BoNT described herein (e.g., ^{ci}LC-Hn/PMP1, ^{ci}BoNT/PMP1A, ^{ci}BoNT/PMP1B, ^{ci}BoNT/PMP1C, ^{ci}BoNT/PMP1D, ^{ci}BoNT/PMP1E, ^{ci}BoNT/PMP1F, ^{ci}BoNT/PMP1G, or ^{ci}BoNT/PMP1H) comprises three amino acid substitutions in a position corresponding to E209, R344, and Y347 in SEQ ID NO: 85. In some embodiments, the inactive protease domain of the catalytically inactive BoNT described herein (e.g., ^{ci}LC-Hn/PMP1, ^{ci}BoNT/PMP1A, ^{ci}BoNT/PMP1B, ^{ci}BoNT/PMP1C, ^{ci}BoNT/PMP1D, ^{ci}BoNT/PMP1E, ^{ci}BoNT/PMP1F, ^{ci}BoNT/PMP1G, or ^{ci}BoNT/PMP1H) comprises amino acid substitutions corresponding to E209Q, R344A, and Y347F in SEQ ID NO: 85.

[0097] In some embodiments, the catalytically inactive BoNT is a ^{ci}LC-Hn/PMP1 comprising an amino acid sequence that is at least 80%, at least 81%, at least 82%, at least 83%, at least 84%, at least 85%, at least 86%, at least 87%, at least 88%, at least 89%, at least 90%, at least 91%, at least 92%, at least 93%, at least 94%, at least 95%, at least 96%, at least 97%, at least 98%, at least 99%, or at least 99.5% identical to the amino acid sequence of SEQ ID NO: 86 and comprises one or more substitution mutation(s) in a position corresponding to H208, E209, H212, R344, or Y347 in SEQ ID NO: 85. In some embodiments, the catalytically inactive BoNT is a ^{ci}LC-Hn/PMP1 comprising an amino acid sequence that is at least 80%, at least 81%, at least 82%, at least 83%, at least 84%, at least 85%, at least 86%, at least 87%, at least 88%, at least 89%, at least 90%, at least 91%, at least 92%, at least 93%, at least 94%, at least 95%, at least 96%, at least 97%, at least 98%, at least 99%, or at least 99.5% identical to the amino acid sequence of SEQ ID NO: 86 and comprises amino acid substitutions corresponding to E209Q, R344A, and Y347F in SEQ ID NO: 85. In some embodiments, the catalytically inactive BoNT is a ^{ci}LC-Hn/PMP1 comprising the amino acid sequence of SEQ ID NO: 86. In some embodiments, the catalytically inactive BoNT is a ^{ci}LC-Hn/PMP1 consisting of the amino acid sequence of SEQ ID NO: 86.

[0098] In some embodiments, the catalytically inactive BoNT is a chimeric BoNT (e.g., ^{ci}BoNT/PMP1A, ^{ci}BoNT/PMP1B, ^{ci}BoNT/PMP1C, ^{ci}BoNT/PMP1D, ^{ci}BoNT/PMP1E, ^{ci}BoNT/PMP1F, ^{ci}BoNT/PMP1G, or ^{ci}BoNT/PMP1H) comprising an amino acid sequence that is at least 80%, at least 81%, at least 82%, at least 83%, at least 84%, at least 85%, at least 86%, at least 87%, at least 88%, at least 89%, at least 90%, at least 91%, at least 92%, at least 93%, at least 94%, at least 95%, at least 96%, at least 97%, at least 98%, at least 99%, or at least 99.5% identical to the amino acid sequence of any one of SEQ ID NOs: 87-94 and comprises one or more substitution mutation(s) in a position corresponding to H208, E209, H212, R344, or Y347 in SEQ ID NO: 85. In some embodiments, the catalytically inactive BoNT is a chimeric BoNT (e.g., ^{ci}BoNT/PMP1A, ^{ci}BoNT/PMP1B, ^{ci}BoNT/PMP1C, ^{ci}BoNT/PMP1D, ^{ci}BoNT/PMP1E, ^{ci}BoNT/PMP1F, ^{ci}BoNT/PMP1G, or ^{ci}BoNT/PMP1H) comprising an amino acid sequence that is at least 80%, at least 81%, at least 82%, at least 83%, at least 84%, at least 85%, at least 86%, at least 87%, at least 88%, at least 89%, at least 90%, at least 91%, at least 92%, at least 93%, at least 94%, at least 95%, at least 96%, at least 97%, at least 98%, at least 99%, or at least 99.5% identical to the amino acid sequence of any one of SEQ ID NOs: 87-94 and comprises amino acid substitutions corresponding to E209Q, R344A, and Y347F in SEQ ID NO: 85. In some embodiments, the catalytically inactive BoNT is a chimeric BoNT (e.g., ^{ci}BoNT/PMP1A, ^{ci}BoNT/PMP1B, ^{ci}BoNT/PMP1C, ^{ci}BoNT/PMP1D, ^{ci}BoNT/PMP1E, ^{ci}BoNT/PMP1F, ^{ci}BoNT/PMP1G, or ^{ci}BoNT/PMP1H) comprising the amino acid sequence of any one of SEQ ID NOs: 87-94. In some embodiments, the catalytically inactive BoNT is a chimeric BoNT (e.g., ^{ci}BoNT/PMP1A, ^{ci}BoNT/PMP1B, ^{ci}BoNT/PMP1C, ^{ci}BoNT/PMP1D, ^{ci}BoNT/PMP1E, ^{ci}BoNT/PMP1F, ^{ci}BoNT/PMP1G, or ^{ci}BoNT/PMP1H) consisting of the amino acid sequence of any one of SEQ ID NOs: 87-94.

[0099] In the natural BoNTs, including the and BoNT-like toxins BoNT/X and BoNT/En, a linker is present between the LC and the N-terminus of the HC (i.e., between LC and Hn). Once a BoNT is translated, the linker is cleaved and the LC and HC are linked via a disulfide bond to produce a mature BoNT. In some embodiments, the catalytically inactive BoNT described herein (e.g., ^{ci}LC-Hn/X, ^{ci}LC-Hn/En, ^{ci}BoNT/XA, ^{ci}BoNT/XB, ^{ci}BoNT/XC, ^{ci}BoNT/XD, ^{ci}BoNT/XE, ^{ci}BoNT/XF, ^{ci}BoNT/XG, ^{ci}BoNT/XH, ^{ci}BoNT/EnA, ^{ci}BoNT/EnB, ^{ci}BoNT/EnC, ^{ci}BoNT/EnD, ^{ci}BoNT/EnE, ^{ci}BoNT/EnF, ^{ci}BoNT/EnG, ^{ci}BoNT/EnH, ^{ci}LC-Hn/PMP1, ^{ci}BoNT/PMP1A, ^{ci}BoNT/PMP1B, ^{ci}BoNT/PMP1C, ^{ci}BoNT/PMP1D, ^{ci}BoNT/PMP1E, ^{ci}BoNT/PMP1F, ^{ci}BoNT/PMP1G, or ^{ci}BoNT/PMP1H) comprises a modified linker, which replaces the natural linker between the inactive protease domain (LC) and the translocation domain (Hn). A “modified linker” refers to a designed linker that is different from the natural linker between the LC and the Hn in BoNT/X, BoNT/E, or BoNT/PMP1). In some embodiments, the modified linker comprises a protease cleave site. A “protease cleavage site” refers to an amino acid sequence that is recognized and cleaved by a protease. Protease cleavage results in the breakage of an amino bond, producing two peptides. Exemplary protease cleavage sites that may be used in the modified linker of the present disclosure include, without limitation, cleavage sites for thrombin (LVPRIGS, SEQ ID NO: 77), TEV (ENLYFQIG, SEQ ID NO: 78), PreScission (3C protease, LEVLFQIGP, SEQ ID NO: 79), Factor Xa (IEGRI, SEQ ID NO: 80; or IEGRI, SEQ ID NO: 81), MMP-12, MMP-13, MMP-17, MMP-20, Granzyme-B, SUMO protease (AHREQIGGI, SEQ ID NO: 82), Furin (RXXRI) and Enterokinase and Enterokinase (DDDDKI, SEQ ID NO: 83). “I” indicates the position cleaved by the protease. In some embodiments, the linker comprises the amino acid sequence of any of SEQ ID NOs: 77-83), and they are used to replace the original linker sequences in BoNT/X (residues P424 to G466) and in BoNT/En (P425 to S437). In some embodiments, the linker contains a thrombin cleavage site. In some embodiments, the linker containing the thrombin cleave site comprises the amino acid sequence of CHKAIDGRSLGGSLVPRGSGGSAAAYNKTLDC (SEQ ID NO: 84). When the linker CHKAIDGRSLGGSLVPRGSGGSAAAYNKTLDC (SEQ ID NO: 84) is used, the disulfide bond between the LC and the HC of the processed BoNT is formed between the cysteine at position 1 and the cysteine at position 32 of the linker. In some embodiments, the catalytically inactive BoNT is a ^{ci}LC-Hn/X comprising a modified linker, and comprises an amino acid sequence that is at least 80%, at least 81%, at least 82%, at least 83%, at least 84%, at least 85%, at least 86%, at least 87%, at least 88%, at least 89%, at least 90%, at least 91%, at least 92%, at least 93%, at least 94%, at least 95%, at least 96%, at least 97%, at least 98%, at least 99%, or at least 99.5% identical to the amino acid sequence of SEQ ID NO: 21 and comprises one or more substitution mutation(s) in a position corresponding to R360, Y363, H227, E228, or H231 in SEQ ID NO: 1. In some embodiments, the catalytically inactive BoNT is a ^{ci}LC-Hn/X comprising a modified linker, and comprises an amino acid sequence that is at least 80%, at least 81%, at least 82%, at least 83%, at least 84%, at least 85%, at least 86%, at least 87%, at least 88%, at least 89%, at least 90%, at least 91%, at least 92%, at least 93%, at least 94%, at least 95%, at least 96%, at least 97%, at least 98%, at least 99%, or at least 99.5% identical to the amino acid sequence of SEQ ID NO: 20 and comprises amino acid substitutions corresponding to E228Q, R360A, and Y363F in SEQ ID NO: 1. In some embodiments, the catalytically inactive BoNT is a ^{ci}LC-Hn/X comprising the amino acid sequence of SEQ ID NO: 21. In some embodiments, the catalytically inactive BoNT is a ^{ci}LC-Hn/X consisting of the amino acid sequence of SEQ ID NO: 21.

[0100] In some embodiments, the catalytically inactive BoNT is a chimeric BoNT (e.g., ^{ci}BoNT/XA, ^{ci}BoNT/XB, ^{ci}BoNT/XC, ^{ci}BoNT/XD, ^{ci}BoNT/XE, ^{ci}BoNT/XF, ^{ci}BoNT/XG, or ^{ci}BoNT/XH with a modified linker) comprising an amino acid sequence that is at least 80%, at least 81%, at least 82%, at least 83%, at least 84%, at least 85%, at least 86%, at least 87%, at least 88%, at least 89%, at least 90%, at least 91%, at least 92%, at least 93%, at least 94%, at least 95%, at least 96%, at least 97%, at least 98%, at least 99%, or at least 99.5% identical to the amino acid sequence of any one of SEQ ID NOs: 23-30, and comprises one or more substitution mutation(s) in a position corresponding to R360, Y363, H227, E228, or H231 in SEQ ID NO: 1. In some embodiments, the catalytically inactive BoNT is a chimeric BoNT (e.g., ^{ci}BoNT/XA, ^{ci}BoNT/XB, ^{ci}BoNT/XC, ^{ci}BoNT/XD, ^{ci}BoNT/XE, ^{ci}BoNT/XF, ^{ci}BoNT/XG, or ^{ci}BoNT/XH with a modified linker) comprising an amino acid sequence that is at least 80%, at least 81%, at least 82%, at least 83%, at least 84%, at least 85%, at least 86%, at least 87%, at least 88%, at least 89%, at least 90%, at least 91%, at least 92%, at least 93%, at least 94%, at least 95%, at least 96%, at least 97%, at least 98%, at least 99%, or at least 99.5% identical to the amino acid sequence of any one of SEQ ID NOs: 23-30 and comprises amino acid substitutions corresponding to E228Q, R360A, and Y363F in SEQ ID NO: 1. In some embodiments, the catalytically inactive BoNT is a chimeric BoNT (e.g., ^{ci}BoNT/XA, ^{ci}BoNT/XB, ^{ci}BoNT/XC, ^{ci}BoNT/XD, ^{ci}BoNT/XE, ^{ci}BoNT/XF, ^{ci}BoNT/XG, or ^{ci}BoNT/XH with a modified linker) comprising the amino acid sequence of any one of SEQ ID NOs: 23-30. In some embodiments, the catalytically inactive BoNT is a chimeric BoNT ((e.g., ^{ci}BoNT/XA, ^{ci}BoNT/XB, ^{ci}BoNT/XC, ^{ci}BoNT/XD, ^{ci}BoNT/XE, ^{ci}BoNT/XF, ^{ci}BoNT/XG, or ^{ci}BoNT/XH with a modified linker) consisting of the amino acid sequence of any one of SEQ ID NOs: 23-30.

[0101] In some embodiments, the catalytically inactive BoNT is a ^{ci}LC-Hn/En comprising a modified linker, and comprises an amino acid sequence that is at least 80%, at least 81%, at least 82%, at least 83%, at least 84%, at least 85%, at least 86%, at least 87%, at least 88%, at least 89%, at least 90%, at least 91%, at least 92%, at least 93%, at least 94%, at least 95%, at least 96%, at least 97%, at least 98%, at least 99%, or at least 99.5% identical to the amino acid sequence of SEQ ID NO: 22 and comprises one or more substitution mutation(s) in a position corresponding to H225, E226, H229, R364, or Y367 in SEQ ID NO: 2. In some embodiments, the catalytically inactive BoNT is a ^{ci}LC-Hn/En comprising a modified linker, and comprises an amino acid sequence that is at least 80%, at least 81%, at least 82%, at least 83%, at least 84%, at least 85%, at least 86%, at least 87%, at least 88%, at least 89%, at least 90%, at least 91%, at least 92%, at least 93%, at least 94%, at least 95%, at least 96%, at least 97%, at least 98%, at least 99%, or at least 99.5% identical to the amino acid sequence of SEQ ID NO: 4 and comprises amino acid substitutions corresponding to E226Q, R364A, and Y367F in SEQ ID NO: 2. In some embodiments, the catalytically inactive BoNT is a ^{ci}LC-Hn/En comprising the amino acid sequence of SEQ ID NO: 22. In some embodiments, the catalytically inactive BoNT is a ^{ci}LC-Hn/En consisting of the amino acid sequence of SEQ ID NO: 22.

[0102] In some embodiments, the catalytically inactive BoNT is a chimeric BoNT (e.g., ^{ci}BoNT/EnA, ^{ci}BoNT/EnB, ^{ci}BoNT/EnC, ^{ci}BoNT/EnD, ^{ci}BoNT/EnE, ^{ci}BoNT/EnF, ^{ci}BoNT/EnG, or ^{ci}BoNT/EnH with a modified linker) comprising an amino acid sequence that is at least 80%, at least 81%, at least 82%, at least 83%, at least 84%, at least 85%, at least 86%, at least 87%, at least 88%, at least 89%, at least 90%, at least 91%, at least 92%, at least 93%, at least 94%, at least 95%, at least 96%, at least 97%, at least 98%, at least 99%, or at least 99.5% identical to the amino acid sequence of any one of SEQ ID NOs: 31-38, and comprises one or more substitution mutation(s) in a position corresponding to H225, E226, H229, R364, or Y367 in SEQ ID NO: 2. In some embodiments, the catalytically inactive BoNT is a chimeric BoNT (e.g., ^{ci}BoNT/EnA, ^{ci}BoNT/EnB, ^{ci}BoNT/EnC, ^{ci}BoNT/EnD, ^{ci}BoNT/EnE, ^{ci}BoNT/EnF, ^{ci}BoNT/EnG, or ^{ci}BoNT/EnH with a modified linker) comprising an amino acid sequence that is at least 80%, at least 81%, at least 82%, at least 83%, at least 84%, at least 85%, at least 86%, at least 87%, at least 88%, at least 89%, at least 90%, at least 91%, at least 92%, at least 93%, at least 94%, at least 95%, at least 96%, at least 97%, at least 98%, at least 99%, or at least 99.5% identical to the amino acid sequence of any one of SEQ ID NOs: 31-38 and comprises amino acid substitutions corresponding to E226Q, R364A, and Y367F in SEQ ID NO: 2. In some embodiments, the catalytically inactive BoNT is a chimeric BoNT (e.g., ^{ci}BoNT/EnA, ^{ci}BoNT/EnB, ^{ci}BoNT/EnC, ^{ci}BoNT/EnD, ^{ci}BoNT/EnE, ^{ci}BoNT/EnF, ^{ci}BoNT/EnG, or ^{ci}BoNT/EnH with a modified linker) comprising the amino acid sequence of any one of SEQ ID NOs: 31-38. In some embodiments, the catalytically inactive BoNT is a chimeric BoNT (e.g., ^{ci}BoNT/EnA, ^{ci}BoNT/EnB, ^{ci}BoNT/EnC, ^{ci}BoNT/EnD, ^{ci}BoNT/EnE, ^{ci}BoNT/EnF, ^{ci}BoNT/EnG, or ^{ci}BoNT/EnH with a modified linker) consisting of the amino acid sequence of any one of SEQ ID NOs: 31-38.

[0103] In some embodiments, the catalytically inactive BoNT is a ^{ci}LC-Hn/PMP1 comprising a modified linker, and comprises an amino acid sequence that is at least 80%, at least 81%, at least 82%, at least 83%, at least 84%, at least 85%, at least 86%, at least 87%, at least 88%, at least 89%, at least 90%, at least 91%, at least 92%, at least 93%, at least 94%, at least 95%, at least 96%, at least 97%, at least 98%, at least 99%, or at least 99.5% identical to the amino acid sequence of SEQ ID NO: 95 and comprises one or more substitution mutation(s) in a position corresponding to H208, E209, H212, R344, or Y347 in SEQ ID NO: 85. In some embodiments, the catalytically inactive BoNT is a ^{ci}LC-Hn/PMP1 comprising a modified linker, and comprises an amino acid sequence that is at least 80%, at least 81%, at least 82%, at least 83%, at least 84%, at least 85%, at least 86%, at least 87%, at least 88%, at least 89%, at least 90%, at least 91%, at least 92%, at least 93%, at least 94%, at least 95%, at least 96%, at least 97%, at least 98%, at least 99%, or at least 99.5% identical to the amino acid sequence of SEQ ID NO: 94 and comprises amino acid substitutions corresponding to E209Q, R344A, and Y347F in SEQ ID NO: 85. In some embodiments, the catalytically inactive BoNT is a ^{ci}LC-Hn/PMP1 comprising the amino acid sequence of SEQ ID NO: 95. In some embodiments, the catalytically inactive BoNT is a ^{ci}LC-Hn/PMP1 consisting of the amino acid sequence of SEQ ID NO: 95.

[0104] In some embodiments, the catalytically inactive BoNT is a chimeric BoNT (e.g., ^{ci}BoNT/PMP1A, ^{ci}BoNT/PMP1B, ^{ci}BoNT/PMP1C, ^{ci}BoNT/PMP1D, ^{ci}BoNT/PMP1E, ^{ci}BoNT/PMP1F, ^{ci}BoNT/PMP1G, or ^{ci}BoNT/PMP1H with a modified linker) comprising an amino acid sequence that is at least 80%, at least 81%, at least 82%, at least 83%, at least 84%, at least 85%, at least 86%, at least 87%, at least 88%, at least 89%, at least 90%, at least 91%, at least 92%, at least 93%, at least 94%, at least 95%, at least 96%, at least 97%, at least 98%, at least 99%, or at least 99.5% identical to the amino acid sequence of any one of SEQ ID NOs: 96-103, and comprises one or more substitution mutation(s) in a position corresponding to H208, E209, H212, R344, or Y347 in SEQ ID NO: 85. In some embodiments, the catalytically inactive BoNT is a chimeric BoNT (e.g., ^{ci}BoNT/PMP1A, ^{ci}BoNT/PMP1B, ^{ci}BoNT/PMP1C, ^{ci}BoNT/PMP1D, ^{ci}BoNT/PMP1E, ^{ci}BoNT/PMP1F, ^{ci}BoNT/PMP1G, or ^{ci}BoNT/PMP1H with a modified linker) comprising an amino acid sequence that is at least 80%, at least 81%, at least 82%, at least 83%, at least 84%, at least 85%, at least 86%, at least 87%, at least 88%, at least 89%, at least 90%, at least 91%, at least 92%, at least 93%, at least 94%, at least 95%, at least 96%, at least 97%, at least 98%, at least 99%, or at least 99.5% identical to the amino acid sequence of any one of SEQ ID NOs: 96-103 and comprises amino acid substitutions corresponding to E209Q, R344A, and Y347F in SEQ ID NO: 85. In some embodiments, the catalytically inactive BoNT is a chimeric BoNT (e.g., ^{ci}BoNT/PMP1A, ^{ci}BoNT/PMP1B, ^{ci}BoNT/PMP1C, ^{ci}BoNT/PMP1D, ^{ci}BoNT/PMP1E, ^{ci}BoNT/PMP1F, ^{ci}BoNT/PMP1G, or ^{ci}BoNT/PMP1H with a modified linker) comprising the amino acid sequence of any one of SEQ ID NOs: 96-103. In some embodiments, the catalytically inactive BoNT is a chimeric BoNT ((e.g., ^{ci}BoNT/PMP1A, ^{ci}BoNT/PMP1B, ^{ci}BoNT/PMP1C, ^{ci}BoNT/PMP1D, ^{ci}BoNT/PMP1E, ^{ci}BoNT/PMP1F, ^{ci}BoNT/PMP1G, or ^{ci}BoNT/PMP1H with a modified linker) consisting of the amino acid sequence of any one of SEQ ID NOs: 96-103.

[0105] In some embodiments, the catalytically inactive BoNT is in its processed form, wherein the light chain (e.g., any one of the inactive LC/X and LC/En described herein) and heavy chain (either Hn or the full heavy chain containing Hn and Hc) is linked by a disulfide bond. In some embodiments, the catalytically inactive BoNT comprises (a) a light chain comprising an inactive LC/X, and (b) a heavy chain comprising: (i) a translocation domain from BoNT/X, and (ii) a receptor binding domain from any one of BoNT/A, BoNT/B, BoNT/C, BoNT/D, BoNT/E, BoNT/F, BoNT/G, BoNT/H, and wherein the light chain and the heavy chain are linked via a disulfide bond. In some embodiments, the catalytically inactive BoNT comprises (a) a light chain comprising an inactive LC/En, and (b) a heavy chain comprising: (i) a translocation domain from BoNT/X, and (ii) a receptor binding domain from any one of BoNT/A, BoNT/B, BoNT/C, BoNT/D, BoNT/E, BoNT/F, BoNT/G, BoNT/H, and wherein the light chain and the heavy chain are linked via a disulfide bond.

[0106] In some embodiments, the catalytically inactive BoNT comprises: (a) a catalytically inactive light chain (^{ci}LC/X) comprising an amino acid sequence that is at least 80%, at least 81%, at least 82%, at least 83%, at least 84%, at least 85%, at least 86%, at least 87%, at least 88%, at least 89%, at least 90%, at least 91%, at least 92%, at least 93%, at least 94%, at least 95%, at least 96%, at least 97%, at least 98%, at least 99%, or at least 99.5% identical to the amino acid sequence of SEQ ID NO:39, and comprises amino acid substitutions corresponding to E228Q, R360A, and Y363F in SEQ ID NO: 1; and (b) a heavy chain (Hn/X-Hc/A, B, C, D, E, F, G, or H) comprising an amino acid sequence that is at least 80%, at least 81%, at least 82%, at least 83%, at least 84%, at least 85%, at least 86%, at least 87%, at least 88%, at least 89%, at least 90%, at least 91%, at least 92%, at least 93%, at least 94%, at least 95%, at least 96%, at least 97%, at least 98%, at least 99%, or at least 99.5% identical to the amino acid sequence of any one of SEQ ID NOs: 40-47, wherein the light chain and the heavy chain are linked via a disulfide bond. In some embodiments, the catalytically inactive BoNT comprises: (a) a light chain comprising an amino acid sequence of SEQ ID NO: 39; and (b) a heavy chain comprising the amino acid sequence of any one of SEQ ID NOs: 40-47, wherein the light chain and the heavy chain are linked via a disulfide bond.

[0107] In some embodiments, the catalytically inactive BoNT comprises: (a) a light chain (^{ci}LC/En) comprising an amino acid sequence that is at least 80%, at least 81%, at least 82%, at least 83%, at least 84%, at least 85%, at least 86%, at least 87%, at least 88%, at least 89%, at least 90%, at least 91%, at least 92%, at least 93%, at least 94%, at least 95%, at least 96%, at least 97%, at least 98%, at least 99%, or at least 99.5% identical to the amino acid sequence of SEQ ID NO: 48, and comprises amino acid substitutions corresponding to amino acid substitutions corresponding to E226Q, R364A, and Y367F in SEQ ID NO: 2; and (b) a heavy chain (Hn/En-Hc/A, B, C, D, E, F, G, or H) comprising an amino acid sequence that is at least 80%, at least 81%, at least 82%, at least 83%, at least 84%, at least 85%, at least 86%, at least 87%, at least 88%, at least 89%, at least 90%, at least 91%, at least 92%, at least 93%, at least 94%, at least 95%, at least 96%, at least 97%, at least 98%, at least 99%, or at least 99.5% identical to the amino acid sequence of any one of SEQ ID NOs: 49-56, wherein the light chain and the heavy chain are linked via a disulfide bond. In some embodiments, the catalytically inactive BoNT comprises: (a) a light chain comprising an amino acid sequence of SEQ ID NO: 48; and (b) a heavy chain comprising the amino acid sequence of any one of SEQ ID NOs: 49-56, wherein the light chain and the heavy chain are linked via a disulfide bond.

[0108] In some embodiments, the catalytically inactive BoNT comprises: (a) a catalytically inactive light chain (^{ci}LC/PMP1) comprising an amino acid sequence that is at least 80%, at least 81%, at least 82%, at least 83%, at least 84%, at least 85%, at least 86%, at least 87%, at least 88%, at least 89%, at least 90%, at least 91%, at least 92%, at least 93%, at least 94%, at least 95%, at least 96%, at least 97%, at least 98%, at least 99%, or at least 99.5% identical to the amino acid sequence of SEQ ID NO: 104, and comprises amino acid substitutions corresponding to E209Q, R344A, and Y347F in SEQ ID NO: 85; and (b) a heavy chain (Hn/PMP1-Hc/A, B, C, D, E, F, G, or H) comprising an amino acid sequence that is at least 80%, at least 81%, at least 82%, at least 83%, at least 84%, at least 85%, at least 86%, at least 87%, at least 88%, at least 89%, at least 90%, at least 91%, at least 92%, at least 93%, at least 94%, at least 95%, at least 96%, at least 97%, at least 98%, at least 99%, or at least 99.5% identical to the amino acid sequence of any one of SEQ ID NOs: 105-112, wherein the light chain and the heavy chain are linked via a disulfide bond. In some embodiments, the catalytically inactive BoNT comprises: (a) a light chain comprising an amino acid sequence of SEQ ID NO: 104; and (b) a heavy chain comprising the amino acid sequence of any one of SEQ ID NOs: 105-112, wherein the light chain and the heavy chain are linked via a disulfide bond.

[0109] Other aspects of the present disclosure provide nucleic acids encoding any one of the BoNTs described herein. The nucleic acids may be DNA or RNA, double-stranded or single stranded. In some embodiments, the nucleic acid is within a vector, such as an expression vector. In some embodiments, the vector comprises a promoter operably linked to the nucleic acid. Also provided are cells comprising the nucleic acids or vectors, and cells expressing the BoNTs.

[0110] Variant nucleotide sequences include sequences that differ by one or more nucleotide substitutions, additions or deletions, such as allelic variants. In some embodiments, the isolated nucleic acid molecule of the present disclosure comprises a polynucleotide encoding a polypeptide comprising an amino acid sequence that has at least 80%, at least 81%, at least 82%, at least 83%, at least 84%, at least 85%, at least 86%, at least 87%, at least 88%, at least 89%, at least 90%, at least 91%, at least 92%, at least 93%, at least 94%, at least 95%, at least 96%, at least 97%, at least 98%, at least 99%, or at least 99.5% identity of any one of SEQ ID NOs: 1-121, and 124-150. In some embodiments, the isolated nucleic acid molecule of the present disclosure comprises a polynucleotide encoding a polypeptide comprising an amino acid sequence that has 85%, 86%, 87%, 88%, 89%, 90%, 91%, 92%, 93%, 94%, 95%, 96%, 97%, 98%, 99%, or 100% identity of any one of SEQ ID NOs: 1-121, and 124-150.

[0111] A variety of promoters can be used for expression of the polypeptides described herein, including, but not limited to, cytomegalovirus (CMV) intermediate early promoter, a viral LTR such as the Rous sarcoma virus LTR, HIV-LTR, HTLV-1 LTR, the simian virus 40 (SV40) early promoter, E. coli lac UV5 promoter, and the herpes simplex virus promoter. Regulatable promoters can also be used. Such regulatable promoters include those using the lac repressor from E. coli as a transcription modulator to regulate transcription from lac operator-bearing mammalian cell promoters [Brown, M. et al., Cell, 49:603-612 (1987)], those using the tetracycline repressor (tetR) [Gossen, M., and Bujard, H., Proc. Natl. Acad. Sci. USA 89:5547-5551 (1992); Yao, F. et al., Human Gene Therapy, 9:1939-1950 (1998); Shockelt, P., et al., Proc. Natl. Acad. Sci. USA, 92:6522-6526 (1995)].

[0112] Other systems include FK506 dimer, VP16 or p65 using astradiol, RU486, diphenol murislerone, or rapamycin. Inducible systems are available from Invitrogen, Clontech and Ariad. Regulatable promoters that include a repressor with the operon can be used. In one embodiment, the lac repressor from Escherichia coli can function as a transcriptional modulator to regulate transcription from lac operator-bearing mammalian cell promoters [M. Brown et al., Cell, 49:603-612 (1987)]; Gossen and Bujard (1992); [M. Gossen et al., Natl. Acad. Sci. USA, 89:5547-5551 (1992)] combined the tetracycline repressor (tetR) with the transcription activator (VP 16) to create a tetR-mammalian cell transcription activator fusion protein, tTa (tetR-VP 16), with the tetO-bearing minimal promoter derived from the human cytomegalovirus (HCMV) major immediate-early promoter to create a tetR-tet operator system to control gene expression in mammalian cells. In one embodiment, a tetracycline inducible switch is used (Yao et al., Human Gene Therapy; Gossen et al., Natl. Acad. Sci. USA, 89:5547-5551 (1992); Shockett et al., Proc. Natl. Acad. Sci. USA, 92:6522-6526 (1995)).

[0113] Additionally, the vector can contain, for example, some or all of the following: a selectable marker gene, such as the neomycin gene for selection of stable or transient transfectants in mammalian cells; enhancer/promoter sequences from the immediate early gene of human CMV for high levels of transcription; transcription termination and RNA processing signals from SV40 for mRNA stability; SV40 polyoma origins of replication and ColE1 for proper episomal replication; internal ribosome binding sites (IRESes), versatile multiple cloning sites; and T7 and SP6 RNA promoters for in vitro transcription of sense and antisense RNA. Suitable vectors and methods for producing vectors containing transgenes are well known and available in the art.

[0114] An expression vector comprising the nucleic acid can be transferred to a host cell by conventional techniques (e.g., electroporation, liposomal transfection, and calcium phosphate precipitation) and the transfected cells are then cultured by conventional techniques to produce the BoNTs described herein. In some embodiments, the expression of the BoNTs described herein is regulated by a constitutive, an inducible or a tissue-specific promoter.

[0115] The host cells used to express BoNTs described herein may be either bacterial cells such as Escherichia coli, or eukaryotic cells (e.g., mammalian cells, such as Chinese hamster ovary cells (CHO), in conjunction with a vector such as the major intermediate early gene promoter element from human cytomegalovirus). A variety of host-expression vector systems may be utilized to express the BoNTs described herein. Such host-expression systems represent vehicles by which the coding sequences of BoNTs described herein may be produced and subsequently purified, but also represent cells which may, when transformed or transfected with the appropriate nucleotide coding sequences, express the BoNTs described herein in situ. These include, but are not limited to, microorganisms such as bacteria (e.g., E. coli and B. subtilis) transformed with recombinant bacteriophage DNA, plasmid DNA or cosmid DNA expression vectors containing coding sequences for the BoNTs described herein; yeast (e.g., Saccharomyces pichia) transformed with recombinant yeast expression vectors containing sequences encoding the BoNTs described herein; insect cell systems infected with recombinant virus expression vectors (e.g., baclovirus) containing the sequences encoding the BoNTs described herein; plant cell systems infected with recombinant virus expression vectors (e.g., cauliflower mosaic virus (CaMV) and tobacco mosaic virus (TMV) or transformed with recombinant plasmid expression vectors (e.g., Ti plasmid) containing sequences encoding the BoNTs described herein; or mammalian cell systems (e.g., COS, CHO, BHK, 293, 293T, 3T3 cells, lymphotic cells (see U.S. Pat. No. 5,807,715), Per C.6 cells (human retinal cells developed by Crucell) harboring recombinant expression constructs containing promoters derived from the genome of mammalian cells (e.g., metallothionein promoter) or from mammalian viruses (e.g., the adenovirus late promoter; the vaccinia virus 7.5K promoter).

[0116] In bacterial systems, a number of expression vectors may be advantageously selected depending upon the use intended for the BoNTs being expressed. For example, when a large quantity of such a protein is to be produced, for the generation of pharmaceutical compositions of BoNTs described herein, vectors which direct the expression of high levels of protein products that are readily purified may be desirable. Such vectors include, but are not limited, to the E. coli expression vector pUR278 (Rüther et al. (1983) “Easy Identification Of cDNA Clones,” EMBO J. 2:1791-1794), in which the coding sequence may be ligated individually into the vector in frame with the lac Z coding region so that a fusion protein is produced; pIN vectors (Inouye et al. (1985) “Up-Promoter Mutations In The lpp Gene Of Escherichia Coli,” Nucleic Acids Res. 13:3101-3110; Van Heeke et al. (1989) “Expression Of Human Asparagine Synthetase In Escherichia Coli,” J. Biol. Chem. 24:5503-5509); and the like. pGEX vectors may also be used to express foreign polypeptides as fusion proteins with glutathione 5-transferase (GST). In general, such fusion proteins are soluble and can easily be purified from lysed cells by adsorption and binding to a matrix glutathione-agarose beads followed by elution in the presence of free glutathione.

[0117] The pGEX vectors are designed to include thrombin or factor Xa protease cleavage sites so that the cloned target gene product can be released from the GST moiety. In an insect system, Autographa californica nuclear polyhedrosis virus (AcNPV) is used as a vector to express foreign genes. The virus grows in Spodoptera frugiperda cells. The coding sequence may be cloned individually into non-essential regions (e.g., the polyhedrin gene) of the virus and placed under control of an AcNPV promoter (e.g., the polyhedrin promoter).

[0118] In mammalian host cells, a number of viral-based expression systems may be utilized. In cases where an adenovirus is used as an expression vector, the coding sequence of interest may be ligated to an adenovirus transcription/translation control complex, e.g., the late promoter and tripartite leader sequence. This chimeric gene may then be inserted in the adenovirus genome by in vitro or in vivo recombination. Insertion in a non-essential region of the viral genome (e.g., region E1 or E3) will result in a recombinant virus that is viable and capable of expressing the immunoglobulin molecule in infected hosts (e.g., see Logan et al. (1984) “Adenovirus Tripartite Leader Sequence Enhances Translation Of mRNAs Late After Infection,” Proc. Natl. Acad. Sci. USA 81:3655-3659). Specific initiation signals may also be required for efficient translation of inserted antibody coding sequences. These signals include the ATG initiation codon and adjacent sequences. Furthermore, the initiation codon must be in phase with the reading frame of the desired coding sequence to ensure translation of the entire insert. These exogenous translational control signals and initiation codons can be of a variety of origins, both natural and synthetic.

[0119] The efficiency of expression may be enhanced by the inclusion of appropriate transcription enhancer elements, transcription terminators, etc. (see Bitter et al. (1987) “Expression And Secretion Vectors For Yeast,” Methods in Enzymol. 153:516-544). In addition, a host cell strain may be chosen which modulates the expression of the inserted sequences, or modifies and processes the gene product in the specific fashion desired. Such modifications (e.g., glycosylation) and processing (e.g., cleavage) of protein products may be important for the function of the protein. For example, in certain embodiments, the BoNTs described herein may be expressed as a single gene product (e.g., as a single BoNT chain, i.e., as a polyprotein precursor), requiring proteolytic cleavage by native or recombinant cellular mechanisms to form separate LC and HC as described herein.

[0120] The disclosure thus encompasses engineering a nucleic acid sequence to encode a polyprotein precursor molecule comprising the BoNTs described herein, which includes coding sequences capable of directing post translational cleavage of said polyprotein precursor. Post-translational cleavage of the polyprotein precursor results in the BoNTs described herein. The post translational cleavage of the precursor molecule comprising the BoNTs described herein may occur in vivo (i.e., within the host cell by native or recombinant cell systems/mechanisms, e.g. furin cleavage at an appropriate site) or may occur in vitro (e.g. incubation of said BoNT chain in a composition comprising proteases or peptidases of known activity and/or in a composition comprising conditions or reagents known to foster the desired proteolytic action).

[0121] Purification and modification of recombinant proteins is well known in the art such that the design of the polyprotein precursor could include a number of embodiments readily appreciated by a skilled worker. Any known proteases or peptidases known in the art can be used for the described modification of the precursor molecule, e.g., thrombin or factor Xa (Nagai et al. (1985) “Oxygen Binding Properties Of Human Mutant Hemoglobins Synthesized In Escherichia Coli,” Proc. Nat. Acad. Sci. USA 82:7252-7255, and reviewed in Jenny et al. (2003) “A Critical Review Of The Methods For Cleavage Of Fusion Proteins With Thrombin And Factor Xa,” Protein Expr. Purif. 31:1-11, each of which is incorporated by reference herein in its entirety)), enterokinase (Collins-Racie et al. (1995) “Production Of Recombinant Bovine Enterokinase Catalytic Subunit In Escherichia Coli Using The Novel Secretory Fusion Partner DsbA,” Biotechnology 13:982-987 hereby incorporated by reference herein in its entirety)), furin, and AcTEV (Parks et al. (1994) “Release Of Proteins And Peptides From Fusion Proteins Using A Recombinant Plant Virus Proteinase,” Anal. Biochem. 216:413-417 hereby incorporated by reference herein in its entirety)) and the Foot and Mouth Disease Virus Protease C3.

[0122] Different host cells have characteristic and specific mechanisms for the post-translational processing and modification of proteins and gene products. Appropriate cell lines or host systems can be chosen to ensure the correct modification and processing of the foreign protein expressed. To this end, eukaryotic host cells which possess the cellular machinery for proper processing of the primary transcript, glycosylation, and phosphorylation of the gene product may be used. Such mammalian host cells include but are not limited to CHO, VERY, BHK, HeLa, COS, MDCK, 293, 293T, 3T3, WI38, BT483, Hs578T, HTB2, BT20 and T47D, CRL7030 and Hs578Bst.

[0123] For long-term, high-yield production of recombinant proteins, stable expression is preferred. For example, cell lines which stably express BoNTs described herein may be engineered. Rather than using expression vectors which contain viral origins of replication, host cells can be transformed with DNA controlled by appropriate expression control elements (e.g., promoter, enhancer, sequences, transcription terminators, polyadenylation sites, etc.), and a selectable marker. Following the introduction of the foreign DNA, engineered cells may be allowed to grow for 1-2 days in an enriched media, and then are switched to a selective media. The selectable marker in the recombinant plasmid confers resistance to the selection and allows cells to stably integrate the plasmid into their chromosomes and grow to form foci which in turn can be cloned and expanded into cell lines. This method may advantageously be used to engineer cell lines which express the BoNTs described herein.

[0124] A number of selection systems may be used, including but not limited to the herpes simplex virus thymidine kinase (Wigler et al. (1977) “Transfer Of Purified Herpes Virus Thymidine Kinase Gene To Cultured Mouse Cells,” Cell 11: 223-232), hypoxanthine-guanine phosphoribosyltransferase (Szybalska et al. (1992) “Use Of The HPRT Gene And The HAT Selection TecH_{N}ique In DNA-Mediated Transformation Of Mammalian Cells First Steps Toward Developing Hybridoma Tecchiques And Gene Therapy,” Bioessays 14: 495-500), and adenine phosphoribosyltransferase (Lowy et al. (1980) “Isolation Of Transforming DNA: Cloning The Hamster aprt Gene,” Cell 22: 817-823) genes can be employed in tk-, hgprt- or aprt-cells, respectively. Also, antimetabolite resistance can be used as the basis of selection for the following genes: dhfr, which confers resistance to methotrexate (Wigler et al. (1980) “Transformation Of Mammalian Cells With An Amplifiable Dominant-Acting Gene,” Proc. Natl. Acad. Sci. USA 77:3567-3570; O'Hare et al. (1981) “Transformation Of Mouse Fibroblasts To Methotrexate Resistance By A Recombinant Plasmid Expressing A Prokaryotic Dihydrofolate Reductase,” Proc. Natl. Acad. Sci. USA 78: 1527-1531); gpt, which confers resistance to mycophenolic acid (Mulligan et al. (1981) “Selection For Animal Cells That Express The Escherichia coli Gene Coding For Xanthine-Guanine Phosphoribosyltransferase,” Proc. Natl. Acad. Sci. USA 78: 2072-2076); neo, which confers resistance to the aminoglycoside G-418 (Tolstoshev (1993) “Gene Therapy, Concepts, Current Trials And Future Directions,” Ann. Rev. Pharmacol. Toxicol. 32:573-596; Mulligan (1993) “The Basic Science Of Gene Therapy,” Science 260:926-932; and Morgan et al. (1993) “Human Gene Therapy,” Ann. Rev. Biochem. 62:191-217) and hygro, which confers resistance to hygromycin (Santerre et al. (1984) “Expression Of Prokaryotic Genes For Hygromycin B And G418 Resistance As Dominant-Selection Markers In Mouse L Cells,” Gene 30:147-156). Methods commonly known in the art of recombinant DNA technology which can be used are described in Ausubel et al. (eds.), 1993, Current Protocols in Molecular Biology, John Wiley & Sons, NY; Kriegler, 1990, Gene Transfer and Expression, A Laboratory Manual, Stockton Press, NY; and in Chapters 12 and 13, Dracopoli et al. (eds), 1994, Current Protocols in Human Genetics, John Wiley & Sons, NY.; Colberre-Garapin et al. (1981) “A New Dominant Hybrid Selective Marker For Higher Eukaryotic Cells,” J. Mol. Biol. 150:1-14.

[0125] The expression levels of BoNTs described herein can be increased by vector amplification (for a review, see Bebbington and Hentschel, The use of vectors based on gene amplification for the expression of cloned genes in mammalian cells in DNA cloning, Vol. 3 (Academic Press, New York, 1987). When a marker in the vector system expressing a BoNT described herein is amplifiable, increase in the level of inhibitor present in culture of host cell will increase the number of copies of the marker gene. Since the amplified region is associated with the nucleotide sequence of a BoNT described herein, production of the BoNT will also increase (Crouse et al. (1983) “Expression And Amplification Of Engineered Mouse Dihydrofolate Reductase Minigenes,” Mol. Cell. Biol. 3:257-266).

[0126] Once a BoNT described herein has been recombinantly expressed, it may be purified by any method known in the art for purification of polypeptides, polyproteins or antibodies (e.g., analogous to antibody purification schemes based on antigen selectivity) for example, by chromatography (e.g., ion exchange, affinity, particularly by affinity for the specific antigen (optionally after Protein A selection where the polypeptide comprises an Fc domain (or portion thereof)), and sizing column chromatography), centrifugation, differential solubility, or by any other standard techₙique for the purification of polypeptides or antibodies. Other aspects of the present disclosure relate to a cell comprising a nucleic acid described herein or a vector described herein.

[0127] The cell may be a prokaryotic or eukaryotic cell. In some embodiments, the cell in a mammalian cell. Exemplary cell types are described herein. Other aspects of the present disclosure related to a cell expressing the BoNT described herein. The cell may be a prokaryotic or eukaryotic cell. In some embodiments, the cell in a mammalian cell. The cell can be for propagation of the nucleic acid or for expression of the nucleic acid, or both. Such cells include, without limitation, prokaryotic cells including, without limitation, strains of aerobic, microaerophilic, capnophilic, facultative, anaerobic, gram-negative and gram-positive bacterial cells such as those derived from, e.g., Escherichia coli, Bacillus subtilis, Bacillus licheniformis, Bacteroides fragilis, Clostridia perfringens, Clostridia difficile, Caulobacter crescentus, Lactococcus lactis, Methylobacterium extorquens, Neisseria meningirulls, Neisseria meningitidis, Pseudomonas fluorescens and Salmonella typhimurium; and eukaryotic cells including, without limitation, yeast strains, such as, e.g., those derived from Pichia pastoris, Pichia methanolica, Pichia angusta, Schizosaccharomyces pombe, Saccharomyces cerevisiae and Yarrowia lipolytica; insect cells and cell lines derived from insects, such as, e.g., those derived from Spodoptera frugiperda, Trichoplusia ni, Drosophila melanogaster and Manduca sexta; and mammalian cells and cell lines derived from mammalian cells, such as, e.g., those derived from mouse, rat, hamster, porcine, bovine, equine, primate and human. Cell lines may be obtained from the American Type Culture Collection, European Collection of Cell Cultures and the German Collection of Microorganisms and Cell Cultures. Non-limiting examples of specific protocols for selecting, making and using an appropriate cell line are described in e.g., INSECT CELL CULTURE ENGINEERING (Mattheus F. A. Goosen et al. eds., Marcel Dekker, 1993); INSECT CELL CULTURES: FUNDAMENTAL AND APPLIED ASPECTS (J. M. Vlak et al. eds., Kluwer Academic Publishers, 1996); Maureen A. Harrison & Ian F. Rae, GENERAL TECH_{N}IQUES OF CELL CULTURE (Cambridge University Press, 1997); CELL AND TISSUE CULTURE: LABORATORY PROCEDURES (Alan Doyle et al eds., JOH_{N} Wiley and Sons, 1998); R. Ian FresH_{N}ey, CULTURE OF ANIMAL CELLS: A MANUAL OF BASIC TECH_{N}IQUE (Wiley-Liss, 4.sup.th ed. 2000); ANIMAL CELL CULTURE: A PRACTICAL APPROACH (JOH_{N} R. W. Masters ed., Oxford University Press, 3.sup.rd ed. 2000); MOLECULAR CLONING A LABORATORY MANUAL, supra, (2001); BASIC CELL CULTURE: A PRACTICAL APPROACH (JOH_{N} M. Davis, Oxford Press, 2.sup.nd ed. 2002); and CURRENT PROTOCOLS IN MOLECULAR BIOLOGY, supra, (2004).

[0128] These protocols are routine procedures within the scope of one skilled in the art and from the teaching herein. Yet other aspects of the present disclosure relate to a method of producing a BoNT described herein, the method comprising obtaining a cell described herein and expressing nucleic acid described herein in said cell. In some embodiments, the method further comprises isolating and purifying a BoNT described herein.

[0129] The term “identity” refers to the overall relatedness between polymeric molecules, for example, between polynucleotide molecules (e.g. DNA molecules and/or RNA molecules) and/or between polypeptide molecules. Calculation of the percent identity of two polypeptide sequences, for example, can be performed by aligning the two sequences for optimal comparison purposes (e.g., gaps can be introduced in one or both of a first and a second polypeptide sequences for optimal alignment and non-identical sequences can be disregarded for comparison purposes). In certain embodiments, the length of a sequence aligned for comparison purposes is at least 30%, at least 40%, at least 50%, at least 60%, at least 70%, at least 80%, at least 90%, at least 95%, or 100% of the length of the reference sequence. The amino acids at corresponding positions are then compared. When a position in the first sequence is occupied by the same amino acid as the corresponding position in the second sequence, then the molecules are identical at that position. The percent identity between the two sequences is a function of the number of identical positions shared by the sequences, taking into account the number of gaps, and the length of each gap, which needs to be introduced for optimal alignment of the two sequences. The comparison of sequences and determination of percent identity between two sequences can be accomplished using a mathematical algorithm, which have been described and are available to those skilled in the art.

[0130] The catalytically inactive BoNTs described herein (e.g., ^{ci}LC-Hn/X, ^{ci}LC-Hn/En, ^{ci}LC-Hn/PMP1, ^{ci}BoNT/XA, ^{ci}BoNT/XB, ^{ci}BoNT/XC, ^{ci}BoNT/XD, ^{ci}BoNT/XE, ^{ci}BoNT/XF, ^{ci}BoNT/XG, ^{ci}BoNT/XH, ^{ci}BoNT/EnA, ^{ci}BoNT/EnB, ^{ci}BoNT/EnC, ^{ci}BoNT/EnD, ^{ci}BoNT/EnE, ^{ci}BoNT/EnF, ^{ci}BoNT/EnG, ^{ci}BoNT/EnH, ^{ci}BoNT/PMP1A, ^{ci}BoNT/PMP1B, ^{ci}BoNT/PMP1C, ^{ci}BoNT/PMP1D, ^{ci}BoNT/PMP1E, ^{ci}BoNT/PMP1F, ^{ci}BoNT/PMP1G, or ^{ci}BoNT/PMP1H) can enter a cell (e.g., a neuron) but cannot cleave its substrates in the cell. The present disclosure provides the use of the catalytically inactive BoNTs described herein (e.g., ^{ci}LC-Hn/X, ^{ci}LC-Hn/En, ^{ci}LC-Hn/PMP1, ^{ci}BoNT/XA, ^{ci}BoNT/XB, ^{ci}BoNT/XC, ^{ci}BoNT/XD, ^{ci}BoNT/XE, ^{ci}BoNT/XF, ^{ci}BoNT/XG, ^{ci}BoNT/XH, ^{ci}BoNT/EnA, ^{ci}BoNT/EnB, ^{ci}BoNT/EnC, ^{ci}BoNT/EnD, ^{ci}BoNT/EnE, ^{ci}BoNT/EnF, ^{ci}BoNT/EnG, ^{ci}BoNT/EnH, ^{ci}BoNT/PMP1A, ^{ci}BoNT/PMP1B, ^{ci}BoNT/PMP1C, ^{ci}BoNT/PMP1D, ^{ci}BoNT/PMP1E, ^{ci}BoNT/PMP1F, ^{ci}BoNT/PMP1G, or ^{ci}BoNT/PMP1H) as a delivery vehicle. In some embodiments, the catalytically inactive BoNT described herein (e.g., ^{ci}LC-Hn/X, ^{ci}LC-Hn/En, ^{ci}LC-Hn/PMP1, ^{ci}BoNT/XA, ^{ci}BoNT/XB, ^{ci}BoNT/XC, ^{ci}BoNT/XD, ^{ci}BoNT/XE, ^{ci}BoNT/XF, ^{ci}BoNT/XG, ^{ci}BoNT/XH, ^{ci}BoNT/EnA, ^{ci}BoNT/EnB, ^{ci}BoNT/EnC, ^{ci}BoNT/EnD, ^{ci}BoNT/EnE, ^{ci}BoNT/EnF, ^{ci}BoNT/EnG, ^{ci}BoNT/EnH, ^{ci}BoNT/PMP1A, ^{ci}BoNT/PMP1B, ^{ci}BoNT/PMP1C, ^{ci}BoNT/PMP1D, ^{ci}BoNT/PMP1E, ^{ci}BoNT/PMP1F, ^{ci}BoNT/PMP1G, or ^{ci}BoNT/PMP1H) is used to deliver an agent (e.g., a therapeutic agent or diagnostic agent) into a cell (e.g., a neuron). The agent (e.g., a therapeutic agent or diagnostic agent) may be associated (e.g., covalently or non-covalently) with the catalytically inactive BoNTs described herein (e.g., ^{ci}LC-Hn/X, ^{ci}LC-Hn/En, ^{ci}LC-Hn/PMP1, ^{ci}BoNT/XA, ^{ci}BoNT/XB, ^{ci}BoNT/XC, ^{ci}BoNT/XD, ^{ci}BoNT/XE, ^{ci}BoNT/XF, ^{ci}BoNT/XG, ^{ci}BoNT/XH, ^{ci}BoNT/EnA, ^{ci}BoNT/EnB, ^{ci}BoNT/EnC, ^{ci}BoNT/EnD, ^{ci}BoNT/EnE, ^{ci}BoNT/EnF, ^{ci}BoNT/EnG, ^{ci}BoNT/EnH, ^{ci}BoNT/PMP1A, ^{ci}BoNT/PMP1B, ^{ci}BoNT/PMP1C, ^{ci}BoNT/PMP1D, ^{ci}BoNT/PMP1E, ^{ci}BoNT/PMP1F, ^{ci}BoNT/PMP1G, or ^{ci}BoNT/PMP1H).

[0131] Accordingly, other aspects of the present disclosure provide complexes comprising a catalytically inactive BoNT-like toxin described herein (e.g., ^{ci}LC-Hn/X, ^{ci}LC-Hn/En, ^{ci}LC-Hn/PMP1, ^{ci}BoNT/XA, ^{ci}BoNT/XB, ^{ci}BoNT/XC, ^{ci}BoNT/XD, ^{ci}BoNT/XE, ^{ci}BoNT/XF, ^{ci}BoNT/XG, ^{ci}BoNT/XH, ^{ci}BoNT/EnA, ^{ci}BoNT/EnB, ^{ci}BoNT/EnC, ^{ci}BoNT/EnD, ^{ci}BoNT/EnE, ^{ci}BoNT/EnF, ^{ci}BoNT/EnG, ^{ci}BoNT/EnH, ^{ci}BoNT/PMP1A, ^{ci}BoNT/PMP1B, ^{ci}BoNT/PMP1C, ^{ci}BoNT/PMP1D, ^{ci}BoNT/PMP1E, ^{ci}BoNT/PMP1F, ^{ci}BoNT/PMP1G, or ^{ci}BoNT/PMP1H) associated with an agent. In some embodiments, the agent is associated with the catalytically inactive BoNT-like toxin covalently (e.g., via a chemical bondage or a chemical linker, or a peptide linker as a protein fusion). In some embodiments, the agent is associated with the catalytically inactive BoNT-like toxin non-covalently (e.g., via hydrogen bonding or van der waals interaction). In some embodiments, the agent is associated with the light chain of the catalytically inactive BoNT-like toxin. In some embodiments, the agent is associated with the heavy chain of the catalytically inactive BoNT-like toxin.

[0132] Being “covalently” associated means the two molecules are linked via a form of chemical bonding that is characterized by the sharing of one or more pairs of electrons between atoms. A covalent bond formed between two molecules may, for example, be an amide bond, an acyl bond, a disulfide bond, an alkyl bond, an ether bond, or an ester bond. A covalent bond formed between two molecules may be, for example, a carbon-carbon bond, a carbon-oxygen bond, a carbon-nitrogen bond, a carbon-sulfur bond, a sulfur-sulfur bond, a carbon-phosphorus bond, a phosphorus-oxygen bond, or a phosphorus-nitrogen bond. When two molecules are covalently associated, they are also referred to herein as being “conjugated” or “fused.” The covalent association can be, for example, via a direct or indirect (e.g., via a linker) covalent linkage. For example, in some embodiments, where two proteins are conjugated to each other, to form a protein fusion, the two proteins may be conjugated via a polypeptide linker, e.g., an amino acid sequence connecting the C-terminus of one protein to the N-terminus of the other protein.

[0133] In some embodiments, the catalytically inactive BoNT-like toxin and/or the agent may be functionalized with a reactive chemical group. One example of such reactive group is a “click chemistry handle.” Click chemistry is a chemical approach introduced by Sharpless in 2001 and describes chemistry tailored to generate substances quickly and reliably by joining small units together. See, e.g., Kolb, Finn and Sharpless Angewandte Chemie International Edition (2001) 40: 2004-2021; Evans, Australian Journal of Chemistry (2007) 60: 384-395). Exemplary coupling reactions (some of which may be classified as “Click chemistry”) include, but are not limited to, formation of esters, thioesters, amides (e.g., such as peptide coupling) from activated acids or acyl halides; nucleophilic displacement reactions (e.g., such as nucleophilic displacement of a halide or ring opening of strained ring systems); azidealkyne Huisgon cycloaddition; thiolyne addition; imine formation; and Michael additions (e.g., maleimide addition). Non-limiting examples of a click chemistry handle include an azide handle, an alkyne handle, or an aziridine handle. Azide is the anion with the formula N3. It is the conjugate base of hydrazoic acid (HN3). N3 is a linear anion that is isoelectronic with CO2, NCO—, N2O, NO2+ and NCF. Azide can be described by several resonance structures, an important one being —N═N+=N—. An alkyne is an unsaturated hydrocarbon containing at least one carboncarbon triple bond. The simplest acyclic alkynes with only one triple bond and no other functional groups form a homologous series with the general chemical formula CnH2n−2. Alkynes are traditionally known as acetylenes, although the name acetylene also refers specifically to C2H2, known formally as ethyne using IUPAC nomenclature. Like other hydrocarbons, alkynes are generally hydrophobic but tend to be more reactive. Aziridines are organic compounds containing the aziridine functional group, a three-membered heterocycle with one amine group (—NH—) and two methylene bridges (—CH2-).

[0134] Other non-limiting, exemplary reactive groups include: acetals, ketals, hemiacetals, and hemiketals, carboxylic acids, strong non-oxidizing acids, strong oxidizing acids, weak acids, acrylates and acrylic acids, acyl halides, sulfonyl halides, chloroformates, alcohols and polyols, aldehydes, alkynes with or without acetylenic hydrogen amides and imides, amines, aromatic, amines, phosphines, pyridines, anhydrides, aryl halides, azo, diazo, azido, hydrazine, and azide compounds, strong bases, weak bases, carbamates, carbonate salts, chlorosilanes, conjugated dienes, cyanides, inorganic, diazonium salts, epoxides, esters, sulfate esters, phosphate esters, thiophosphate esters borate esters, ethers, soluble fluoride salts, fluorinated organic compounds, halogenated organic compounds, halogenating agents, aliphatic saturated hydrocarbons, aliphatic unsaturated hydrocarbons, hydrocarbons, aromatic, insufficient information for classification, isocyanates and isothiocyanates, ketones, metal hydrides, metal alkyls, metal aryls, and silanes, alkali metals, nitrate and nitrite compounds, inorganic, nitrides, phosphides, carbides, and silicides, nitriles, nitro, nitroso, nitrate, nitrite compounds, organic, non-redox-active inorganic compounds, organometallics, oximes, peroxides, organic, phenolic salts, phenols and cresols, polymerizable compounds, quaternary ammonium and phosphonium salts, strong reducing agents, weak reducing agents, acidic salts, basic salts, siloxanes, inorganic sulfides, organic sulfides, sulfite and thiosulfate salts, sulfonates, phosphonates, organic thiophosphonates, thiocarbamate esters and salts, and dithiocarbamate esters and salts.

[0135] When one molecule of the complex (e.g., the catalytically inactive BoNT-like toxin or the agent) is functionalized with a chemically reactive group, the other molecule of the complex (e.g., the agent or the catalytically inactive BoNT-like toxin) may contain a corresponding chemical group that reacts with the chemically reactive group, thus resulting in covalent attachment. In some embodiments, the agent is a protein or peptide and one or more of the amino acids of the protein or peptide may be modified to include a chemical entity such as a carbohydrate group, a hydroxyl group, a phosphate group, a farnesyl group, an isofarnesyl group, a fatty acid group, a linker for attaching to the catalytically inactive BoNT-like toxin.

[0136] In some embodiments, the agent is linked to catalytically inactive toxins via sortase-mediated protein ligation, e.g., as described in Antos et al., Current Opinion in Structural Biology, 2016, 38:111-118, incorporated herein by reference.

[0137] Being “non-covalently” associated means two molecules are associated via a type of interaction that does not involve the sharing of electrons between the molecules, but involves variations of electromagnetic, electrostatic, or hydrophobic interactions. “Associated with” includes both covalent or non-covalent associate. When the associate is non-covalent, in some embodiments, the interactions between two molecules have a K_{D} of <10⁻⁵ M, <10⁻⁶ M, <10⁻⁷ M, <10⁻⁸ M, <10⁻⁹ M, <10⁻¹⁰ M, <10⁻¹¹ M, or <10⁻¹² M.

[0138] In some embodiments, the complex described herein comprises a catalytically inactive BoNT-like toxin (e.g., ^{ci}LC-Hn/X, ^{ci}LC-Hn/En, ^{ci}LC-Hn/PMP1, ^{ci}BoNT/XA, ^{ci}BoNT/XB, ^{ci}BoNT/XC, ^{ci}BoNT/XD, ^{ci}BoNT/XE, ^{ci}BoNT/XF, ^{ci}BoNT/XG, ^{ci}BoNT/XH, ^{ci}BoNT/EnA, ^{ci}BoNT/EnB, ^{ci}BoNT/EnC, ^{ci}BoNT/EnD, ^{ci}BoNT/EnE, ^{ci}BoNT/EnF, ^{ci}BoNT/EnG, ^{ci}BoNT/EnH, ^{ci}BoNT/PMP1A, ^{ci}BoNT/PMP1B, ^{ci}BoNT/PMP1C, ^{ci}BoNT/PMP1D, ^{ci}BoNT/PMP1E, ^{ci}BoNT/PMP1F, ^{ci}BoNT/PMP1G, or ^{ci}BoNT/PMP1H) associated with an agent, wherein the catalytically inactive BoNT-like toxin is in its processed form (i.e., when the heavy chain and light chain are linked via a disulfide bond).

[0139] In some embodiments, the complex comprises ^{ci}BoNT/XA associated with an agent, wherein the ^{ci}BoNT/XA comprises: (a) a light chain comprising an inactive LC/X, (b) a heavy chain comprising: (i) a translocation domain from BoNT/X (Hn/X), and (ii) a receptor binding domain from BoNT/A (Hc/A), wherein the light chain and the heavy chain are linked via a disulfide bond. In some embodiments, the agent is a polypeptide and is fused to the N-terminus of the light chain (LC/X).

[0140] In some embodiments, the complex comprises ^{ci}BoNT/EnA associated with an agent, wherein the ^{ci}BoNT/EnA comprises: (a) a light chain comprising an inactive LC/En, (b) a heavy chain comprising: (i) a translocation domain from BoNT/En (Hn/En), and (ii) a receptor binding domain from BoNT/A (Hc/A), wherein the light chain and the heavy chain are linked via a disulfide bond. In some embodiments, the agent is a polypeptide and is fused to the N-terminus of the light chain (LC/En).

[0141] In some embodiments, the complex comprises ^{ci}BoNT/PMP1A associated with an agent, wherein the ^{ci}BoNT/PMP1A comprises: (a) a light chain comprising an inactive LC/PMP1, (b) a heavy chain comprising: (i) a translocation domain from BoNT/PMP1 (Hn/PMP1), and (ii) a receptor binding domain from BoNT/A (Hc/A), wherein the light chain and the heavy chain are linked via a disulfide bond. In some embodiments, the agent is a polypeptide and is fused to the N-terminus of the light chain (LC/PMP1).

[0142] In some embodiments, the agent is a nucleic acid. A “nucleic acid” is at least two nucleotides covalently linked together, and in some instances, may contain phosphodiester bonds (e.g., a phosphodiester “backbone”). A nucleic acid may be DNA, both genomic and/or cDNA, RNA or a hybrid, where the nucleic acid contains any combination of deoxyribonucleotides and ribonucleotides (e.g., artificial or natural), and any combination of bases, including uracil, adenine, thymine, cytosine, guanine, inosine, xanthine, hypoxanthine, isocytosine and isoguanine. Nucleic acids of the present disclosure may be produced using standard molecular biology methods (see, e.g., Green and Sambrook, Molecular Cloning, A Laboratory Manual, 2012, Cold Spring Harbor Press). None limiting examples of nucleic acid molecules that may be used as the agent of the present disclosure include: DNA or messenger RNA (mRNA) encoding a protein effector (e.g., without limitation, enzymes, antigens, antibodies, immune modulators, transcriptional activators, and transcriptional repressors), RNAi molecules (e.g., microRNA, siRNA, or shRNA), guide RNA (gRNAs), and DNA/RNA based aptamers.

[0143] In some embodiments, the agent is a protein or peptide. The terms “protein,” “peptide,” and “polypeptide” are used interchangeably herein, and refer to a polymer of amino acid residues linked together by peptide (amide) bonds. The terms refer to a protein, peptide, or polypeptide of any size, structure, or function. Typically, a protein, peptide, or polypeptide will be at least three amino acids long. A protein, peptide, or polypeptide may refer to an individual protein or a collection of proteins. One or more of the amino acids in a protein, peptide, or polypeptide may be modified, for example, by the addition of a chemical entity such as a carbohydrate group, a hydroxyl group, a phosphate group, a farnesyl group, an isofarnesyl group, a fatty acid group, a linker for conjugation, functionalization, or other modification, etc. A protein, peptide, or polypeptide may also be a single molecule or may be a multi-molecular complex. A protein, peptide, or polypeptide may be just a fragment of a naturally occurring protein or peptide. A protein, peptide, or polypeptide may be naturally occurring, recombinant, or synthetic, or any combination thereof. The term “fusion protein” as used herein refers to a hybrid polypeptide which comprises protein domains from at least two different proteins. One protein may be located at the amino-terminal (N-terminal) portion of the fusion protein or at the carboxy-terminal (C-terminal) protein thus forming an “amino-terminal fusion protein” or a “carboxy-terminal fusion protein,” respectively. Any of the proteins provided herein may be produced by any method known in the art. For example, the proteins provided herein may be produced via recombinant protein expression and purification, which is especially suited for fusion proteins comprising a peptide linker. The proteins/peptides can also be linked to inactive BoNT-like toxins via a disulfide bond, which would be able to release the delivered protein from the toxin once it reaches the cytosol of cells. Methods for recombinant protein expression and purification are well known, and include those described by Green and Sambrook, Molecular Cloning: A Laboratory Manual (4^{th} ed., Cold Spring Harbor Laboratory Press, Cold Spring Harbor, N.Y. (2012)), the entire contents of which are incorporated herein by reference.

[0144] In some embodiments, the agent is a small molecule. A “small molecule” refers to an organic compound, whether naturally-occurring or artificially created (e.g., via chemical synthesis) that has a relatively low molecular weight. Typically, an organic compound contains carbon. An organic compound may contain multiple carbon-carbon bonds, stereocenters, and other functional groups (e.g., amines, hydroxyl, carbonyls, or heterocyclic rings). In some embodiments, small molecules are monomeric organic compounds that have a molecular weight of less than about 1500 g/mol. In certain embodiments, the molecular weight of the small molecule is less than about 1000 g/mol or less than about 500 g/mol. In certain embodiments, the small molecule is a drug, for example, a drug that has already been deemed safe and effective for use in humans or animals by the appropriate governmental agency or regulatory body.

[0145] In some embodiments, the agent is a therapeutic agent. A “therapeutic agent” refers to an agent that has therapeutic effects to a disease or disorder. A therapeutic agent may be, without limitation, proteins, peptides, nucleic acids, polysaccharides and carbohydrates, lipids, glycoproteins, small molecules, synthetic organic and inorganic drugs exerting a biological effect when administered to a subject, a proteolysis targeting chimera molecule (PROTAC) and combinations thereof. In some embodiments, the therapeutic agent is an anti-inflammatory agent, a vaccine antigen, a vaccine adjuvant, an antibody, and enzyme, an anti-cancer drug or chemotherapeutic drug, a clotting factor, a hormone, a steroid, a cytokine, an antibiotic, or a drug for the treatment of cardiovascular disease, an infectious disease, an autoimmune disease, allergy, a blood disorder, a metabolic disorder, a skin disease, or a neurological disease. In some embodiments, the therapeutic agent is a drug for treating botulism, e.g., an antibody that can neutralize a BoNT.

[0146] In some embodiments, the therapeutic agent is an antibody or an antibody fragment. An “antibody” or “immunoglobulin (Ig)” is a large, Y-shaped protein produced mainly by plasma cells that is used by the immune system to neutralize an exogenous substance (e.g., a pathogens such as bacteria and viruses). Antibodies are classified as IgA, IgD, IgE, IgG, and IgM. “Antibodies” and “antibody fragments” include whole antibodies and any antigen binding fragment (i.e., “antigen-binding portion”) or single chain thereof. In some embodiments, an antibody is a glycoprotein comprising two or more heavy (H) chains and two or more light (L) chains inter-connected by disulfide bonds, or an antigen binding portion thereof. Each heavy chain is comprised of a heavy chain variable region (abbreviated herein as VH) and a heavy chain constant region. The heavy chain constant region is comprised of three domains, CH1, CH2 and CH3. Each light chain is comprised of a light chain variable region (abbreviated herein as VL) and a light chain constant region. The light chain constant region is comprised of one domain, CL. The VH and VL regions can be further subdivided into regions of hypervariability, termed complementarity determining regions (CDR), interspersed with regions that are more conserved, termed framework regions (FR). Each VH and VL is composed of three CDRs and four FRs, arranged from amino-terminus to carboxy-terminus in the following order: FR1, CDR1, FR2, CDR2, FR3, CDR3, FR4. The variable regions of the heavy and light chains contain a binding domain that interacts with an antigen. The constant regions of the antibodies may mediate the binding of the immunoglobulin to host tissues or factors, including various cells of the immune system (e.g., effector cells) and the first component (C1q) of the classical complement system. An antibody may be a polyclonal antibody or a monoclonal antibody.

[0147] The basic 4-chain antibody unit is a heterotetrameric glycoprotein composed of two identical L chains and two H chains (an IgM antibody consists of 5 of the basic heterotetramer unit along with an additional polypeptide called J chain, and therefore contain 10 antigen binding sites, while secreted IgA antibodies can polymerize to form polyvalent assemblages comprising 2-5 of the basic 4-chain units along with J chain). In the case of IgGs, the 4-chain unit is generally about 150,000 daltons. Each L chain is linked to a H chain by one covalent disulfide bond, while the two H chains are linked to each other by one or more disulfide bonds depending on the H chain isotype. Each H and L chain also has regularly spaced intrachain disulfide bridges. Each H chain has at the N-terminus, a variable domain (VH) followed by three constant domains (CH) for each of the α and γ chains and four CH domains for μ and ε isotypes. Each L chain has at the N-terminus, a variable domain (VL) followed by a constant domain (CL) at its other end. The VL is aligned with the VH and the CL is aligned with the first constant domain of the heavy chain (CH1). Particular amino acid residues are believed to form an interface between the light chain and heavy chain variable domains. The pairing of a VH and VL together forms a single antigen-binding site. For the structure and properties of the different classes of antibodies, (e.g., Basic and Clinical Immunology, 8th edition, Daniel P. Stites, Abba I. Terr and Tristram G. Parslow (eds.), Appleton & Lange, Norwalk, Conn., 1994, page 71 and Chapter 6, incorporated herein by reference).

[0148] The L chain from any vertebrate species can be assigned to one of two clearly distinct types, called kappa and lambda, based on the amino acid sequences of their constant domains. Depending on the amino acid sequence of the constant domain of their heavy chains (CH), immunoglobulins can be assigned to different classes or isotypes. There are five classes of immunoglobulins: IgA, IgD, IgE, IgG, and IgM, having heavy chains designated α, δ, ε, γ and μ, respectively. The γ and a classes are further divided into subclasses on the basis of relatively minor differences in CH sequence and function, e.g., humans express the following subclasses: IgG1, IgG2, IgG3, IgG4, IgA1, and IgA2.

[0149] The V domain mediates antigen binding and define specificity of a particular antibody for its particular antigen. However, the variability is not evenly distributed across the 110-amino acid span of the variable domains. Instead, the V regions consist of relatively invariant stretches called framework regions (FRs) of 15-30 amino acids separated by shorter regions of extreme variability called “hypervariable regions” that are each 9-12 amino acids long. The variable domains of native heavy and light chains each comprise four FRs, largely adopting a (3-sheet configuration, connected by three hypervariable regions, which form loops connecting, and in some cases forming part of, the β-sheet structure. The hypervariable regions in each chain are held together in close proximity by the FRs and, with the hypervariable regions from the other chain, contribute to the formation of the antigen-binding site of antibodies (see, e.g., Kabat et al., Sequences of Proteins of Immunological Interest, 5th Ed. Public Health Service, National Institutes of Health, Bethesda, Md. (1991), incorporated herein by reference). The constant domains are not involved directly in binding an antibody to an antigen, but exhibit various effector functions, such as participation of the antibody in antibody dependent cellular cytotoxicity (ADCC).

[0150] In some embodiments, the antibody is a monoclonal antibody. A “monoclonal antibody” is an antibody obtained from a population of substantially homogeneous antibodies, i.e., the individual antibodies comprising the population are identical except for possible naturally occurring mutations that may be present in minor amounts. Monoclonal antibodies are highly specific, being directed against a single antigenic site. Furthermore, in contrast to polyclonal antibody preparations which include different antibodies directed against different determinants (epitopes), each monoclonal antibody is directed against a single determinant on the antigen. In addition to their specificity, the monoclonal antibodies are advantageous in that they may be synthesized uncontaminated by other antibodies. The modifier “monoclonal” is not to be construed as requiring production of the antibody by any particular method. For example, the monoclonal antibodies useful in the present invention may be prepared by the hybridoma methodology first described by Kohler et al., Nature, 256:495 (1975), or may be made using recombinant DNA methods in bacterial, eukaryotic animal or plant cells (see, e.g., U.S. Pat. No. 4,816,567). Monoclonal antibodies may also be isolated from phage antibody libraries, e.g., using the techniques described in Clackson et al., Nature, 352:624-628 (1991) and Marks et al., J. Mol. Biol., 222:581-597 (1991), incorporated herein by reference.

[0151] The monoclonal antibodies described herein encompass “chimeric” antibodies in which a portion of the heavy and/or light chain is identical with or homologous to corresponding sequences in antibodies derived from a particular species or belonging to a particular antibody class or subclass, while the remainder of the chain(s) is identical with or homologous to corresponding sequences in antibodies derived from another species or belonging to another antibody class or subclass, as well as fragments of such antibodies, so long as they exhibit the desired biological activity (see U.S. Pat. No. 4,816,567; and Morrison et al., Proc. Natl. Acad. Sci. USA, 81:6851-6855 (1984)). Chimeric antibodies of interest herein include “primatized” antibodies comprising variable domain antigen-binding sequences derived from a non-human primate (e.g. Old World Monkey, Ape etc.), and human constant region sequences.

[0152] In some embodiments, the antibodies are “humanized” for use in human (e.g., as therapeutics). “Humanized” forms of non-human (e.g., rodent) antibodies are chimeric antibodies that contain minimal sequence derived from the non-human antibody. Humanized antibodies are human immunoglobulins (recipient antibody) in which residues from a hypervariable region of the recipient are replaced by residues from a hypervariable region of a non-human species (donor antibody) such as mouse, rat, rabbit or non-human primate having the desired antibody specificity, affinity, and capability. In some instances, framework region (FR) residues of the human immunoglobulin are replaced by corresponding non-human residues. Furthermore, humanized antibodies may comprise residues that are not found in the recipient antibody or in the donor antibody. These modifications are made to further refine antibody performance. In general, the humanized antibody will comprise substantially all of at least one, and typically two, variable domains, in which all or substantially all of the hypervariable loops correspond to those of a non-human immunoglobulin and all or substantially all of the FRs are those of a human immunoglobulin sequence. The humanized antibody optionally also will comprise at least a portion of an immunoglobulin constant region (Fc), typically that of a human immunoglobulin. For further details, see Jones et al., Nature 321:522-525 (1986); Riechmann et al., Nature 332:323-329 (1988); and Presta, Curr. Op. Struct. Biol. 2:593-596 (1992).

[0153] In some embodiments, the therapeutic agent is an antibody fragment containing the antigen-binding portion of an antibody. The antigen-binding portion of an antibody refers to one or more fragments of an antibody that retain the ability to specifically bind to an antigen. It has been shown that the antigen-binding function of an antibody can be performed by fragments of a full-length antibody. Examples of binding fragments encompassed within the term “antigen-binding portion” of an antibody include (i) a Fab fragment, a monovalent fragment consisting of the VL, VH, CL and CH1 domains; (ii) a F(ab′)2 fragment, a bivalent fragment comprising two Fab fragments linked by a disulfide bridge at the hinge region; (iii) a Fd fragment consisting of the VH and CH1 domains; (iv) a Fv fragment consisting of the VL and VH domains of a single arm of an antibody, (v) a dAb fragment (e.g., as described in Ward et al., (1989) Nature 341:544-546, incorporated herein by reference), which consists of a VH domain; and (vi) an isolated complementarity determining region (CDR). Furthermore, although the two domains of the Fv fragment, VL and VH, are coded for by separate genes, they can be joined, using recombinant methods, by a synthetic linker that enables them to be made as a single protein chain in which the VL and VH regions pair to form monovalent molecules (known as single chain Fv (scFv); see e.g., Bird et al. (1988) Science 242:423-426; and Huston et al. (1988) Proc. Natl. Acad. Sci. USA 85:5879-5883, incorporated herein by reference). Such single chain antibodies are also intended to be encompassed within the term “antigen-binding portion” of an antibody. These antibody fragments are obtained using conventional techniques known to those with skill in the art, and the fragments are screened for utility in the same manner as are full-length antibodies.

[0154] In some embodiments, the therapeutic agent of the present disclosure is a Fc fragment, a Fv fragment, or a single-change Fv fragment. The Fc fragment comprises the carboxy-terminal portions of both H chains held together by disulfides. The effector functions of antibodies are determined by sequences in the Fc region, which region is also the part recognized by Fc receptors (FcR) found on certain types of cells.

[0155] The Fv fragment is the minimum antibody fragment which contains a complete antigen-recognition and -binding site. This fragment consists of a dimer of one heavy- and one light-chain variable region domain in tight, non-covalent association. From the folding of these two domains emanate six hypervariable loops (3 loops each from the H and L chain) that contribute the amino acid residues for antigen binding and confer antigen binding specificity to the antibody. However, even a single variable domain (or half of an Fv comprising only three CDRs specific for an antigen) has the ability to recognize and bind antigen, although at a lower affinity than the entire binding site.

[0156] In some embodiments, the therapeutic agent is an antigen binding fragment. An “antigen binding fragment (Fab)” is the region on an antibody that binds antigens. The Fab is composed of one constant and one variable domain from each of the heavy and light chain polypeptides of the antibody. The antigen binding site is formed by the variable domains of the heavy and light chain antibodies.

[0157] In some embodiments, the therapeutic agent is a single chain variable fragment (ScFv). A “single-chain variable fragment (scFv)” is a fusion protein of the variable regions of the heavy (VH) and light chains (VL) of immunoglobulins, connected with a short peptide linker comprising 10-25 amino acids. The linker peptide is usually rich in glycine for flexibility, as well as serine or threonine for solubility, and connects the N-terminus of the VH chain with the C-terminus of the VL chain, or vice versa. The scFv retains the specificity of the original immunoglobulin, despite the addition of the linker and removal of the constant regions. In some embodiments, the sFv polypeptide further comprises a polypeptide linker between the VH and VL domains which enables the sFv to form the desired structure for antigen binding (e.g., as described in Pluckthun in The Pharmacology of Monoclonal Antibodies, vol. 113, Rosenburg and Moore eds., Springer-Verlag, New York, pp. 269-315 (1994); Borrebaeck 1995, incorporated herein by reference).

[0158] In some embodiments, the therapeutic agent is a diabody. A diabody is a dimeric antibody fragment designed to form two antigen binding sites. Diabodies are composed of two single-chain variable fragments (scFvs) in the same polypeptide connected by a linker peptide which is too short (˜3-6 amino acids) to allow pairing between the two domains on the same chain, forcing the domains to pair with complementary domains of another chain to form two antigen binding sites. Alternately, the two scFvs can also be connected with longer linkers, such as leucine zippers.

[0159] In some embodiments, the therapeutic agent is an affibody. An “affibody” is an antibody mimetics engineered to bind to a large number of target proteins or peptides with high affinity, imitating monoclonal antibodies. These molecules can be used for molecular recognition in diagnostic and therapeutic applications.

[0160] In some embodiments, the therapeutic agent of the present disclosure is single chain antibody (e.g., a heavy chain-only antibody). It is known that Camilids produce heavy chain-only antibodies (e.g., as described in Hamers-Casterman et al., 1992, incorporated herein by reference). The single-domain variable fragments of these heavy chain-only antibodies are termed VHHs or nanobodies. VHHs retain the immunoglobulin fold shared by antibodies, using three hypervariable loops, CDR1, CDR2 and CDR3, to bind to their targets. Many VHHs bind to their targets with affinities similar to conventional full-size antibodies, but possess other properties superior to them. Therefore, VHHs are attractive tools for use in biological research and therapeutics. VHHs are usually between 10 to 15 kDa in size, and can be recombinantly expressed in high yields, both in the cytosol and in the periplasm in E. coli. VHHs can bind to their targets in mammalian cytosol. A VHH fragment (e.g., NANOBODY®) is a recombinant, antigen-specific, single-domain, variable fragment derived from camelid heavy chain antibodies. Although they are small, VHH fragments retain the full antigen-binding capacity of the full antibody. VHHs are small in size, highly soluble and stable, and have greater set of accessible epitopes, compared to traditional antibodies. They are also easy to use as the extracellular target-binding moiety of the chimeric receptor described herein, because no reformatting is required. In the some embodiments, the therapeutic agent is a series of antibodies (e.g., VHHs) that target different targets.

[0161] In some embodiments, the therapeutic agent is an antibody that can neutralize a BoNT. Such BoNT-neutralizing antibodies can be delivered into a neuron using the catalytically inactive BoNT and the methods described herein. BoNT-neutralizing antibodies can be used to treat botulism, e.g., in subjects that have been exposed to a BoNT. In some embodiments, the BoNT-neutralizing antibody is a full length antibody, a FAB, a ScFv, a VHH, a diabody, or an affibody. BoNT-neutralizing antibodies are known in the art, e.g., as described in Tremblay et al., 2010, Toxicon, 56:990-998, incorporated herein by reference.

[0162] In some embodiments, the BoNT-neutralizing antibody is a BoNT/A antibody. In some embodiments, the BoNT/A antibody is an anti-BoNT/A VHH. In some embodiments, the anti-BoNT/A VHH targets the LC of BoNT/A. In some embodiments, the anti-BoNT/A VHH comprises an amino acid sequence that is at least 80%, at least 81%, at least 82%, at least 83%, at least 84%, at least 85%, at least 86%, at least 87%, at least 88%, at least 89%, at least 90%, at least 91%, at least 92%, at least 93%, at least 94%, at least 95%, at least 96%, at least 97%, at least 98%, at least 99%, or at least 99.5% identical to the amino acid sequence of SEQ ID NO: 57 or SEQ ID NO: 58. In some embodiments, the anti-BoNT/A VHH comprises the amino acid sequence of SEQ ID NO: 57 or SEQ ID NO: 58. In some embodiments, the anti-BoNT/A VHH consists of the amino acid sequence of SEQ ID NO: 57 or SEQ ID NO: 58.

[0163] In some embodiments, the BoNT-neutralizing antibody is a BoNT/B antibody. In some embodiments, the BoNT/A antibody is an anti-BoNT/B VHH. In some embodiments, the anti-BoNT/B VHH targets the LC of BoNT/B. In some embodiments, the anti-BoNT/B VHH comprises an amino acid sequence that is at least 80%, at least 81%, at least 82%, at least 83%, at least 84%, at least 85%, at least 86%, at least 87%, at least 88%, at least 89%, at least 90%, at least 91%, at least 92%, at least 93%, at least 94%, at least 95%, at least 96%, at least 97%, at least 98%, at least 99%, or at least 99.5% identical to the amino acid sequence of SEQ ID NO: 67, SEQ ID NO: 113, SEQ ID NO: 114, or SEQ ID NO: 130. In some embodiments, the anti-BoNT/B VHH comprises the amino acid sequence of SEQ ID NO: 67, SEQ ID NO: 113, SEQ ID NO: 114, or SEQ ID NO: 130. In some embodiments, the anti-BoNT/B VHH consists of the amino acid sequence of SEQ ID NO: 67, SEQ ID NO: 113, or SEQ ID NO: 114, or SEQ ID NO: 130.

[0164] In some embodiments, the BoNT-neutralizing antibody is a VHH fusion polypeptide (e.g., with a VHH targeting BoNT/A fused to a VHH targeting BoNT/B). In some embodiments, the VHH fusion polypeptide comprises a VHH as set forth in SEQ ID NO: 57 or SEQ ID NO: 58, or any variants thereof, fused to a VHH as set forth in SEQ ID NO 67, SEQ ID NO: 113, or SEQ ID NO: 114, or any variants thereof.

[0165] In some embodiments, the therapeutic agent for use in accordance with the present disclosure is a BoNT/A antibody (e.g., an anti-BoNT/A VHH) fused to a E. coli Thioredoxin 1 (TrxA), i.e., a TrxA-anti-BoNT/A VHH fusion protein or TrxA-anti-BoNT/B VHH fusion protein. In some embodiments, TrxA facilitates the folding of VHH protein and increase the yield of VHH in E. coli. In some embodiments, the TrxA is fused to the C-terminus of the anti-BoNT/A VHH. In some embodiments, the TrxA is fused to the N-terminus of the anti-BoNT/A VHH. In some embodiments, the TrxA is fused to the anti-BoNT/A VHH via a peptide linker (e.g., a linker that contains a protease cleavage site). The linker may contain any of the protease cleavage sites provided herein (e.g., SEQ ID NOs:77-84). In some embodiments, the TrxA-anti-BoNT/A VHH fusion protein comprises an amino acid sequence that is at least 80%, at least 81%, at least 82%, at least 83%, at least 84%, at least 85%, at least 86%, at least 87%, at least 88%, at least 89%, at least 90%, at least 91%, at least 92%, at least 93%, at least 94%, at least 95%, at least 96%, at least 97%, at least 98%, at least 99%, or at least 99.5% identical to the amino acid sequence of any one of SEQ ID NOs: 59, 60, and 68. In some embodiments, the TrxA-anti-BoNT/A VHH fusion protein comprises the amino acid sequence of any one of SEQ ID NOs: 59, 60, and 68. In some embodiments, the TrxA-anti-BoNT/A VHH fusion protein consists of the amino acid sequence of any one of SEQ ID NOs: 59, 60, and 68. In some embodiments, a TrxA is fused to a VHH fusion protein (e.g., as exemplified in SEQ ID NOs: 116, 117, and 118). In some embodiments, the fusion polypeptide comprises an amino acid sequence that is at least 80%, at least 81%, at least 82%, at least 83%, at least 84%, at least 85%, at least 86%, at least 87%, at least 88%, at least 89%, at least 90%, at least 91%, at least 92%, at least 93%, at least 94%, at least 95%, at least 96%, at least 97%, at least 98%, at least 99%, or at least 99.5% identical to the amino acid sequence of SEQ ID NOs: 116, 117, and 118. In some embodiments, fusion polypeptide comprises the amino acid sequence of SEQ ID NOs: 116, 117, and 118.

[0166] In some embodiments, the anti-BoNT/A VHH or the TrxA-anti-BoNT/A VHH fusion protein is attached to the LC of the catalytically inactive BoNT/X, BoNT/En, or BoNT/PMP1 described herein. For example, the anti-BoNT/A VHH or the TrxA-anti-BoNT/A VHH fusion protein may be fused to the N-terminus of the LC of the catalytically inactive BoNT/X, BoNT/En, or BoNT/PMP1 described herein. In some embodiments, the anti-BoNT/A VHH or the TrxA-anti-BoNT/A VHH fusion protein is fused to the N-terminus of the LC of ^{ci}BoNT/XA. In some embodiments, the anti-BoNT/A VHH or the TrxA-anti-BoNT/A VHH fusion protein is fused to the N-terminus of the LC of ^{ci}BoNT/EnA. In some embodiments, the anti-BoNT/A VHH or the TrxA-anti-BoNT/A VHH fusion protein is fused to the N-terminus of the LC of ^{ci}BoNT/PMP1A. In some embodiments, the anti-BoNT/A VHH or the TrxA-anti-BoNT/A VHH fusion protein is fused to the N-terminus of the LC of ^{ci}BoNT/XA, wherein the ^{ci}BoNT/XA is in its processed form (i.e., wherein the LC and the HC are linked via a disulfide bond). In some embodiments, the anti-BoNT/A VHH or the TrxA-anti-BoNT/A VHH fusion protein is fused to the N-terminus of the LC of ^{ci}BoNT/EnA, wherein the ^{ci}BoNT/EnA is in its processed form (i.e., wherein the LC and the HC are linked via a disulfide bond). In some embodiments, the anti-BoNT/A VHH or the TrxA-anti-BoNT/A VHH fusion protein is fused to the N-terminus of the LC of ^{ci}BoNT/PMP1A, wherein the ^{ci}BoNT/PMP1A is in its processed form (i.e., wherein the LC and the HC are linked via a disulfide bond).

[0167] In some embodiments, the complex described herein comprises a first polypeptide comprising an anti-BoNT/A VHH or TrxA-anti-BoNT/A VHH fusion protein fused to the N-terminus of a catalytically inactive LC/X and a second polypeptide comprising a Hn/X and Hc/A, wherein the first polypeptide and the second polypeptide are linked via a disulfide bond. In some embodiments, the complex described herein comprises a first polypeptide comprising an anti-BoNT/A VHH or TrxA-anti-BoNT/A VHH fusion protein fused to the N-terminus of a catalytically inactive LC/En and a second polypeptide comprising a Hn/En and Hc/A, wherein the first polypeptide and the second polypeptide are linked via a disulfide bond. In some embodiments, the complex described herein comprises a first polypeptide comprising an anti-BoNT/A VHH or TrxA-anti-BoNT/A VHH fusion protein fused to the N-terminus of a catalytically inactive LC/PMP1 and a second polypeptide comprising a Hn/PMP1 and Hc/A, wherein the first polypeptide and the second polypeptide are linked via a disulfide bond.

[0168] In some embodiments, the anti-BoNT/B VHH or the TrxA-anti-BoNT/B VHH fusion protein is attached to the LC of the catalytically inactive BoNT/X or BoNT/En described herein. For example, the anti-BoNT/B VHH or the TrxA-anti-BoNT/B VHH fusion protein may be fused to the N-terminus of the LC of the catalytically inactive BoNT/X or BoNT/En described herein. In some embodiments, the anti-BoNT/A VHH or the TrxA-anti-BoNT/B VHH fusion protein is fused to the N-terminus of the LC of ^{ci}BoNT/XA. In some embodiments, the anti-BoNT/B VHH or the TrxA-anti-BoNT/B VHH fusion protein is fused to the N-terminus of the LC of ^{ci}BoNT/EnA. In some embodiments, the anti-BoNT/A VHH or the TrxA-anti-BoNT/B VHH fusion protein is fused to the N-terminus of the LC of ^{ci}BoNTPMP1A. In some embodiments, the anti-BoNT/B VHH or the TrxA-anti-BoNT/B VHH fusion protein is fused to the N-terminus of the LC of ^{ci}BoNT/XA, wherein the ^{ci}BoNT/XA is in its processed form (i.e., wherein the LC and the HC are linked via a disulfide bond). In some embodiments, the anti-BoNT/B VHH or the TrxA-anti-BoNT/B VHH fusion protein is fused to the N-terminus of the LC of ^{ci}BoNT/EnA, wherein the ^{ci}BoNT/EnA is in its processed form (i.e., wherein the LC and the HC are linked via a disulfide bond). In some embodiments, the anti-BoNT/B VHH or the TrxA-anti-BoNT/B VHH fusion protein is fused to the N-terminus of the LC of ^{ci}BoNT/PMP1A, wherein the ^{ci}BoNT/PMP1A is in its processed form (i.e., wherein the LC and the HC are linked via a disulfide bond).

[0169] In some embodiments, the complex described herein comprises a first polypeptide comprising an anti-BoNT/B VHH or TrxA-anti-BoNT/B VHH fusion protein fused to the N-terminus of a catalytically inactive LC/X and a second polypeptide comprising a Hn/X and Hc/A, wherein the first polypeptide and the second polypeptide are linked via a disulfide bond. In some embodiments, the complex described herein comprises a first polypeptide comprising an anti-BoNT/B VHH or TrxA-anti-BoNT/B VHH fusion protein fused to the N-terminus of a catalytically inactive LC/En and a second polypeptide comprising a Hn/En and Hc/A, wherein the first polypeptide and the second polypeptide are linked via a disulfide bond. In some embodiments, the complex described herein comprises a first polypeptide comprising an anti-BoNT/B VHH or TrxA-anti-BoNT/B VHH fusion protein fused to the N-terminus of a catalytically inactive LC/PMP1 and a second polypeptide comprising a Hn/PMP1 and Hc/A, wherein the first polypeptide and the second polypeptide are linked via a disulfide bond.

[0170] In some embodiments, the complex described herein comprises a first polypeptide comprising an amino acid sequence that is at least 80%, at least 81%, at least 82%, at least 83%, at least 84%, at least 85%, at least 86%, at least 87%, at least 88%, at least 89%, at least 90%, at least 91%, at least 92%, at least 93%, at least 94%, at least 95%, at least 96%, at least 97%, at least 98%, at least 99%, or at least 99.5% identical to the amino acid sequence of any one of SEQ ID NOs: 61, 62, and 69, and a second polypeptide comprising an amino acid sequence that is at least 80%, at least 81%, at least 82%, at least 83%, at least 84%, at least 85%, at least 86%, at least 87%, at least 88%, at least 89%, at least 90%, at least 91%, at least 92%, at least 93%, at least 94%, at least 95%, at least 96%, at least 97%, at least 98%, at least 99%, or at least 99.5% identical to the amino acid sequence of any one of SEQ ID NOs: 40-47, wherein the first polypeptide and the second polypeptide are linked via disulfide bond. In some embodiments, the complex described herein comprises a first polypeptide comprising the amino acid sequence of SEQ ID NO: 61 and a second polypeptide comprising the amino acid sequence of SEQ ID NO: 40, wherein the first polypeptide and the second polypeptide are linked via disulfide bond. In some embodiments, the complex described herein comprises a first polypeptide comprising the amino acid sequence of SEQ ID NO: 62 and a second polypeptide comprising the amino acid sequence of SEQ ID NO: 40, wherein the first polypeptide and the second polypeptide are linked via disulfide bond. In some embodiments, the complex described herein comprises a first polypeptide comprising the amino acid sequence of SEQ ID NO: 69 and a second polypeptide comprising the amino acid sequence of SEQ ID NO: 40, wherein the first polypeptide and the second polypeptide are linked via disulfide bond.

[0171] In some embodiments, the complex described herein comprises a first polypeptide comprising an amino acid sequence that is at least 80%, at least 81%, at least 82%, at least 83%, at least 84%, at least 85%, at least 86%, at least 87%, at least 88%, at least 89%, at least 90%, at least 91%, at least 92%, at least 93%, at least 94%, at least 95%, at least 96%, at least 97%, at least 98%, at least 99%, or at least 99.5% identical to the amino acid sequence of any one of SEQ ID NOs: 124, 125, and 131, and a second polypeptide comprising an amino acid sequence that is at least 80%, at least 81%, at least 82%, at least 83%, at least 84%, at least 85%, at least 86%, at least 87%, at least 88%, at least 89%, at least 90%, at least 91%, at least 92%, at least 93%, at least 94%, at least 95%, at least 96%, at least 97%, at least 98%, at least 99%, or at least 99.5% identical to the amino acid sequence of any one of SEQ ID NOs: 40-47, wherein the first polypeptide and the second polypeptide are linked via disulfide bond. In some embodiments, the complex described herein comprises a first polypeptide comprising the amino acid sequence of SEQ ID NO: 124 and a second polypeptide comprising the amino acid sequence of SEQ ID NO: 40, wherein the first polypeptide and the second polypeptide are linked via disulfide bond. In some embodiments, the complex described herein comprises a first polypeptide comprising the amino acid sequence of SEQ ID NO: 125 and a second polypeptide comprising the amino acid sequence of SEQ ID NO: 40, wherein the first polypeptide and the second polypeptide are linked via disulfide bond. In some embodiments, the complex described herein comprises a first polypeptide comprising the amino acid sequence of SEQ ID NO: 131 and a second polypeptide comprising the amino acid sequence of SEQ ID NO: 40, wherein the first polypeptide and the second polypeptide are linked via disulfide bond.

[0172] In some embodiments, the complex described herein comprises a first polypeptide comprising an amino acid sequence that is at least 80%, at least 81%, at least 82%, at least 83%, at least 84%, at least 85%, at least 86%, at least 87%, at least 88%, at least 89%, at least 90%, at least 91%, at least 92%, at least 93%, at least 94%, at least 95%, at least 96%, at least 97%, at least 98%, at least 99%, or at least 99.5% identical to the amino acid sequence of any one of SEQ ID NOs: 63, 64, and 70, and a second polypeptide comprising an amino acid sequence that is at least 80%, at least 81%, at least 82%, at least 83%, at least 84%, at least 85%, at least 86%, at least 87%, at least 88%, at least 89%, at least 90%, at least 91%, at least 92%, at least 93%, at least 94%, at least 95%, at least 96%, at least 97%, at least 98%, at least 99%, or at least 99.5% identical to the amino acid sequence of any one of SEQ ID NOs: 49-56, wherein the first polypeptide and the second polypeptide are linked via disulfide bond. In some embodiments, the complex described herein comprises a first polypeptide comprising the amino acid sequence of SEQ ID NO: 63 and a second polypeptide comprising the amino acid sequence of SEQ ID NO: 49, wherein the first polypeptide and the second polypeptide are linked via disulfide bond. In some embodiments, the complex described herein comprises a first polypeptide comprising the amino acid sequence of SEQ ID NO: 64 and a second polypeptide comprising the amino acid sequence of SEQ ID NO: 49, wherein the first polypeptide and the second polypeptide are linked via disulfide bond. In some embodiments, the complex described herein comprises a first polypeptide comprising the amino acid sequence of SEQ ID NO: 70 and a second polypeptide comprising the amino acid sequence of SEQ ID NO: 49, wherein the first polypeptide and the second polypeptide are linked via disulfide bond.

[0173] In some embodiments, the complex described herein comprises a first polypeptide comprising an amino acid sequence that is at least 80%, at least 81%, at least 82%, at least 83%, at least 84%, at least 85%, at least 86%, at least 87%, at least 88%, at least 89%, at least 90%, at least 91%, at least 92%, at least 93%, at least 94%, at least 95%, at least 96%, at least 97%, at least 98%, at least 99%, or at least 99.5% identical to the amino acid sequence of any one of SEQ ID NOs: 126, 127, and 132, and a second polypeptide comprising an amino acid sequence that is at least 80%, at least 81%, at least 82%, at least 83%, at least 84%, at least 85%, at least 86%, at least 87%, at least 88%, at least 89%, at least 90%, at least 91%, at least 92%, at least 93%, at least 94%, at least 95%, at least 96%, at least 97%, at least 98%, at least 99%, or at least 99.5% identical to the amino acid sequence of any one of SEQ ID NOs: 49-56, wherein the first polypeptide and the second polypeptide are linked via disulfide bond. In some embodiments, the complex described herein comprises a first polypeptide comprising the amino acid sequence of SEQ ID NO: 126 and a second polypeptide comprising the amino acid sequence of SEQ ID NO: 49, wherein the first polypeptide and the second polypeptide are linked via disulfide bond. In some embodiments, the complex described herein comprises a first polypeptide comprising the amino acid sequence of SEQ ID NO: 127 and a second polypeptide comprising the amino acid sequence of SEQ ID NO: 49, wherein the first polypeptide and the second polypeptide are linked via disulfide bond. In some embodiments, the complex described herein comprises a first polypeptide comprising the amino acid sequence of SEQ ID NO: 132 and a second polypeptide comprising the amino acid sequence of SEQ ID NO: 49, wherein the first polypeptide and the second polypeptide are linked via disulfide bond.

[0174] In some embodiments, the complex described herein comprise an amino acid sequence that is at least 80%, at least 81%, at least 82%, at least 83%, at least 84%, at least 85%, at least 86%, at least 87%, at least 88%, at least 89%, at least 90%, at least 91%, at least 92%, at least 93%, at least 94%, at least 95%, at least 96%, at least 97%, at least 98%, at least 99%, or at least 99.5% identical to the amino acid sequence of any one of SEQ ID NOs: 65, 66, 71, 72, 128, 129, 133, and 134. In some embodiments, the complex described herein comprises the amino acid sequence of any one of SEQ ID NOs: 65, 66, 71, 72, 128, 129, 133, and 134.

[0175] In some embodiments, the complex described herein comprise an amino acid sequence that is at least 80%, at least 81%, at least 82%, at least 83%, at least 84%, at least 85%, at least 86%, at least 87%, at least 88%, at least 89%, at least 90%, at least 91%, at least 92%, at least 93%, at least 94%, at least 95%, at least 96%, at least 97%, at least 98%, at least 99%, or at least 99.5% identical to the amino acid sequence of any one of SEQ ID NOs: 128, 129, 133, and 134. In some embodiments, the complex described herein comprises the amino acid sequence of any one of SEQ ID NOs: 128, 129, 133, and 134.

[0176] In some embodiments, the complex described herein comprises two BoNT targeting VHHs (an anti-BoNT/A VHH and an anti-BoNT/B VHH) fused to a catalytically inactive BoNT described herein. VHH fusion polypeptides comprising two VHHs are exemplified in SEQ ID NOs: 116, 117, and 118. In some embodiments, the VHH fusion polypeptide comprises an amino acid sequence that is at least 80%, at least 81%, at least 82%, at least 83%, at least 84%, at least 85%, at least 86%, at least 87%, at least 88%, at least 89%, at least 90%, at least 91%, at least 92%, at least 93%, at least 94%, at least 95%, at least 96%, at least 97%, at least 98%, at least 99%, or at least 99.5% identical to the amino acid sequence of SEQ ID NOs: 116, 117, and 118. In some embodiments, VHH fusion polypeptide comprises the amino acid sequence of SEQ ID NOs: 116, 117, and 118.

[0177] In some embodiments, the complex described herein comprises two BoNT targeting VHHs (an anti-BoNT/A VHH and an anti-BoNT/B VHH) fused to a catalytically inactive BoNT described herein. VHH fusion polypeptides comprising two VHHs are exemplified in SEQ ID NOs: 139, 140, and 141. In some embodiments, the VHH fusion polypeptide comprises an amino acid sequence that is at least 80%, at least 81%, at least 82%, at least 83%, at least 84%, at least 85%, at least 86%, at least 87%, at least 88%, at least 89%, at least 90%, at least 91%, at least 92%, at least 93%, at least 94%, at least 95%, at least 96%, at least 97%, at least 98%, at least 99%, or at least 99.5% identical to the amino acid sequence of SEQ ID NOs: 139, 140, and 141. In some embodiments, VHH fusion polypeptide comprises the amino acid sequence of SEQ ID NOs: 139, 140, and 141.

[0178] In some embodiments, the complex comprising two BoNT-targeting VHHs comprises a first polypeptide comprising an amino acid sequence that is at least 80%, at least 81%, at least 82%, at least 83%, at least 84%, at least 85%, at least 86%, at least 87%, at least 88%, at least 89%, at least 90%, at least 91%, at least 92%, at least 93%, at least 94%, at least 95%, at least 96%, at least 97%, at least 98%, at least 99%, or at least 99.5% identical to the amino acid sequence of SEQ ID NO: 73, and a second polypeptide comprising an amino acid sequence that is at least 80%, at least 81%, at least 82%, at least 83%, at least 84%, at least 85%, at least 86%, at least 87%, at least 88%, at least 89%, at least 90%, at least 91%, at least 92%, at least 93%, at least 94%, at least 95%, at least 96%, at least 97%, at least 98%, at least 99%, or at least 99.5% identical to the amino acid sequence of any one of SEQ ID NOs: 40-47, wherein the first polypeptide and the second polypeptide are linked via disulfide bond. In some embodiments, the complex comprising two BoNT-targeting VHHs comprises a first polypeptide comprising the amino acid sequence of SEQ ID NO: 73 and a second polypeptide comprising the amino acid sequence of SEQ ID NO: 40, wherein the first polypeptide and the second polypeptide are linked via disulfide bond.

[0179] In some embodiments, the complex comprising two BoNT-targeting VHHs comprises a first polypeptide comprising an amino acid sequence that is at least 80%, at least 81%, at least 82%, at least 83%, at least 84%, at least 85%, at least 86%, at least 87%, at least 88%, at least 89%, at least 90%, at least 91%, at least 92%, at least 93%, at least 94%, at least 95%, at least 96%, at least 97%, at least 98%, at least 99%, or at least 99.5% identical to the amino acid sequence of SEQ ID NO: 135, and a second polypeptide comprising an amino acid sequence that is at least 80%, at least 81%, at least 82%, at least 83%, at least 84%, at least 85%, at least 86%, at least 87%, at least 88%, at least 89%, at least 90%, at least 91%, at least 92%, at least 93%, at least 94%, at least 95%, at least 96%, at least 97%, at least 98%, at least 99%, or at least 99.5% identical to the amino acid sequence of any one of SEQ ID NOs: 40-47, wherein the first polypeptide and the second polypeptide are linked via disulfide bond. In some embodiments, the complex comprising two BoNT-targeting VHHs comprises a first polypeptide comprising the amino acid sequence of SEQ ID NO: 135 and a second polypeptide comprising the amino acid sequence of SEQ ID NO: 40, wherein the first polypeptide and the second polypeptide are linked via disulfide bond.

[0180] In some embodiments, the complex comprising two BoNT-targeting VHHs comprises a first polypeptide comprising an amino acid sequence that is at least 80%, at least 81%, at least 82%, at least 83%, at least 84%, at least 85%, at least 86%, at least 87%, at least 88%, at least 89%, at least 90%, at least 91%, at least 92%, at least 93%, at least 94%, at least 95%, at least 96%, at least 97%, at least 98%, at least 99%, or at least 99.5% identical to the amino acid sequence of SEQ ID NO: 74, and a second polypeptide comprising an amino acid sequence that is at least 80%, at least 81%, at least 82%, at least 83%, at least 84%, at least 85%, at least 86%, at least 87%, at least 88%, at least 89%, at least 90%, at least 91%, at least 92%, at least 93%, at least 94%, at least 95%, at least 96%, at least 97%, at least 98%, at least 99%, or at least 99.5% identical to the amino acid sequence of any one of SEQ ID NOs: 49-56, wherein the first polypeptide and the second polypeptide are linked via disulfide bond. In some embodiments, the complex comprising two BoNT-targeting VHHs comprises a first polypeptide comprising the amino acid sequence of SEQ ID NO: 74 and a second polypeptide comprising the amino acid sequence of SEQ ID NO: 49, wherein the first polypeptide and the second polypeptide are linked via disulfide bond.

[0181] In some embodiments, the complex comprising two BoNT-targeting VHHs comprises a first polypeptide comprising an amino acid sequence that is at least 80%, at least 81%, at least 82%, at least 83%, at least 84%, at least 85%, at least 86%, at least 87%, at least 88%, at least 89%, at least 90%, at least 91%, at least 92%, at least 93%, at least 94%, at least 95%, at least 96%, at least 97%, at least 98%, at least 99%, or at least 99.5% identical to the amino acid sequence of SEQ ID NO: 136, and a second polypeptide comprising an amino acid sequence that is at least 80%, at least 81%, at least 82%, at least 83%, at least 84%, at least 85%, at least 86%, at least 87%, at least 88%, at least 89%, at least 90%, at least 91%, at least 92%, at least 93%, at least 94%, at least 95%, at least 96%, at least 97%, at least 98%, at least 99%, or at least 99.5% identical to the amino acid sequence of any one of SEQ ID NOs: 49-56, wherein the first polypeptide and the second polypeptide are linked via disulfide bond. In some embodiments, the complex comprising two BoNT-targeting VHHs comprises a first polypeptide comprising the amino acid sequence of SEQ ID NO: 136 and a second polypeptide comprising the amino acid sequence of SEQ ID NO: 49, wherein the first polypeptide and the second polypeptide are linked via disulfide bond.

[0182] In some embodiments, the complex comprising two BoNT-targeting VHHs comprises an amino acid sequence that is at least 80%, at least 81%, at least 82%, at least 83%, at least 84%, at least 85%, at least 86%, at least 87%, at least 88%, at least 89%, at least 90%, at least 91%, at least 92%, at least 93%, at least 94%, at least 95%, at least 96%, at least 97%, at least 98%, at least 99%, or at least 99.5% identical to the amino acid sequence of any one of SEQ ID NOs: 75, 76, 119, 120, 137, 138, and 142-150 In some embodiments, the complex comprising two BoNT-targeting VHHs comprises the amino acid sequence of any one of 75, 76, 119, 120, 137, 138, and 142-150.

[0183] Other antibodies that may be used in accordance with the present disclosure target antigens including, without limitation: (a) anti-cluster of differentiation antigen CD-1 through CD-166 and the ligands or counter receptors for these molecules; (b) anti-cytokine antibodies, e.g., anti-IL-1 through anti-IL-18 and the receptors for these molecules; (c) anti-immune receptor antibodies, antibodies against T cell receptors, major histocompatibility complexes I and II, B cell receptors, selectin killer inhibitory receptors, killer activating receptors, OX-40, MadCAM-1, Gly-CAM1, integrins, cadherens, sialoadherens, Fas, CTLA-4, Fc.gamma.-receptors, Fcalpha-receptors, Fc.epsilon.-receptors, Fc.mu.-receptors, and their ligands; (d) anti-metalloproteinase antibodies, e.g., collagenase, MMP-1 through MMP-8, TIMP-1, TIMP-2; anti-cell lysis/proinflammatory molecules, e.g., perforin, complement components, prostanoids, nitron oxide, thromboxanes; and (e) anti-adhesion molecules, e.g., carcioembryonic antigens, lamins, fibronectins.

[0184] Other non-limiting, exemplary antibodies and fragments thereof that may be used in accordance with the present disclosure include: bevacizumab (AVASTIN®), trastuzumab (HERCEPTIN®), alemtuzumab (CAMPATH®, indicated for B cell chronic lymphocytic leukemia,), gemtuzumab (MYLOTARG®, hP67.6, anti-CD33, indicated for leukemia such as acute myeloid leukemia), rituximab (RITUXAN®), tositumomab (BEXXAR®, anti-CD20, indicated for B cell malignancy), MDX-210 (bispecific antibody that binds simultaneously to HER-2/neu oncogene protein product and type I Fc receptors for immunoglobulin G (IgG) (Fc gamma RI)), oregovomab (OVAREX®, indicated for ovarian cancer), edrecolomab (PANOREX®), daclizumab (ZENAPAX®), palivizumab (SYNAGIS®, indicated for respiratory conditions such as RSV infection), ibritumomab tiuxetan (ZEVALIN®, indicated for Non-Hodgkin's lymphoma), cetuximab (ERBITUX®), MDX-447, MDX-22, MDX-220 (anti-TAG-72), IOR-05, IOR-T6 (anti-CD1), IOR EGF/R3, celogovab (ONCOSCINT® OV103), epratuzumab (LYMPHOCIDE®), pemtumomab (THERAGYN®) and Gliomab-H (indicated for brain cancer, melanoma). Other antibodies and antibody fragments are contemplated and may be used in accordance with the disclosure.

[0185] In some embodiments, the therapeutic agent is a vaccine antigen. A “vaccine antigen” is a molecule or moiety that, when administered to a subject, activates or increases the production of antibodies that specifically bind the antigen. In some embodiments, an antigen is a protein or a polysaccharide. Antigens of pathogens are well known to those of skill in the art and include, but are not limited to parts (coats, capsules, cell walls, flagella, fimbriae, and toxins) of bacteria, viruses, and other microorganisms. A vaccine typically comprises an antigen, and is intentionally administered to a subject to induce an immune response in the recipient subject. The antigen may be from a pathogenic virus, bacteria, or fungi.

[0186] Examples of pathogenic virus include, without limitation: Retroviridae (e.g., human immunodeficiency viruses, such as HIV-1 (also referred to as HTLV-III, LAV or HTLV-III/LAV, or HIV-III; and other isolates, such as HIV-LP; Picornaviridae (e.g., polio viruses, hepatitis A virus; enteroviruses, human coxsackie viruses, rhinoviruses, echoviruses); Calciviridae (e.g., strains that cause gastroenteritis); Togaviridae (e.g., equine encephalitis viruses, rubella viruses); Flaviridae (e.g., dengue viruses, encephalitis viruses, yellow fever viruses); Coronaviridae (e.g., coronaviruses); Rhabdoviridae (e.g., vesicular stomatitis viruses, rabies viruses); Filoviridae (e.g., ebola viruses); Paramyxoviridae (e.g., parainfluenza viruses, mumps virus, measles virus, respiratory syncytial virus); Orthomyxoviridae (e.g., influenza viruses); Bungaviridae (e.g., Hantaan viruses, bunga viruses, phleboviruses and Nairo viruses); Arena viridae (hemorrhagic fever viruses); Reoviridae (e.g., reoviruses, orbiviurses and rotaviruses); Birnaviridae; Hepadnaviridae (Hepatitis B virus); Parvoviridae (parvoviruses); Papovaviridae (papilloma viruses, polyoma viruses); Adenoviridae (most adenoviruses); Herpesviridae (herpes simplex virus (HSV) 1 and 2, varicella zoster virus, cytomegalovirus (CMV), herpes viruses’); Poxviridae (variola viruses, vaccinia viruses, pox viruses); and Iridoviridae (e.g., African swine fever virus); and unclassified viruses (e.g., the etiological agents of Spongiform encephalopathies, the agent of delta hepatitis (thought to be a defective satellite of hepatitis B virus), the agents of non-A, non-B hepatitis (class 1=internally transmitted; class 2=parenterally transmitted (i.e., Hepatitis C); Norwalk and related viruses, and astroviruses).

[0187] Examples of pathogenic bacteria include, without limitation: Helicobacter pyloris, Borelia burgdorferi, Legionella pneumophilia, Mycobacteria spp. (e.g., M. tuberculosis, M. avium, M. intracellulare, M. kansasii, M. gordonae), Staphylococcus aureus, Neisseria gonorrhoeae, Neisseria meningitidis, Listeria monocytogenes, Streptococcus pyogenes (Group A Streptococcus), Streptococcus agalactiae (Group B Streptococcus), Streptococcus (viridans group), Streptococcus faecalis, Streptococcus bovis, Streptococcus (anaerobic spp.), Streptococcus pneumoniae, pathogenic Campylobacter sp., Enterococcus sp., Haemophilus influenzae, Bacillus anthracis, Corynebacterium diphtheriae, Corynebacterium sp., Erysipelothrix rhusiopathiae, Clostridium perfringens, Clostridium tetani, Enterobacter aerogenes, Klebsiella pneumoniae, Pasteurella multocida, Bacteroides sp., Fusobacterium nucleatum, Streptobacillus moniliformis, Treponema pallidum, Treponema pertenue, Leptospira, and Actinomyces israelli.

[0188] Examples of pathogenic fungi include, without limitation: Cryptococcus neoformans, Histoplasma capsulatum, Coccidioides immitis, Blastomyces dermatitidis, Chlamydia trachomatis, Candida albicans. Other infectious organisms (i.e., protists) include: Plasmodium falciparum and Toxoplasma gondii.

[0189] Other non-limiting examples of agents that may be delivered using the glycosphingolipids described herein are provided.

[0190] Non-limiting, exemplary chemopharmaceutically compositions that may be used in the liposome drug delivery systems of the present disclosure include, Actinomycin, All-trans retinoic acid, Azacitidine, Azathioprine, Bleomycin, Bortezomib, Carboplatin, Capecitabine, Cisplatin, Chlorambucil, Cyclophosphamide, Cytarabine, Daunorubicin, Docetaxel, Doxifluridine, Doxorubicin, Epirubicin, Epothilone, Etoposide, Fluorouracil, Gemcitabine, Hydroxyurea, Idarubicin, Imatinib, Irinotecan, Mechlorethamine, Mercaptopurine, Methotrexate, Mitoxantrone, Oxaliplatin, Paclitaxel, Pemetrexed, Teniposide, Tioguanine, Topotecan, Valrubicin, Vinblastine, Vincristine, Vindesine, and Vinorelbine. In some embodiments, the chemotherapeutic agent is Doxorubicin.

[0191] Examples of antineoplastic compounds include, without limitation: nitrosoureas, e.g., carmustine, lomustine, semustine, strepzotocin; Methylhydrazines, e.g., procarbazine, dacarbazine; steroid hormones, e.g., glucocorticoids, estrogens, progestins, androgens, tetrahydrodesoxycaricosterone, cytokines and growth factors; Asparaginase.

[0192] Examples of immunoactive compounds include, without limitation: immunosuppressives, e.g., pyrimethamine, trimethopterin, penicillamine, cyclosporine, azathioprine; immunostimulants, e.g., levamisole, diethyl dithiocarbamate, enkephalins, endorphins.

[0193] Examples of antimicrobial compounds include, without limitation: antibiotics, e.g., beta lactam, penicillin, cephalosporins, carbapenims and monobactams, beta-lactamase inhibitors, aminoglycosides, macrolides, tetracyclins, spectinomycin; Antimalarials, Amebicides, Antiprotazoal, Antifungals, e.g., amphotericin beta, antiviral, e.g., acyclovir, idoxuridine, ribavirin, trifluridine, vidarbine, gancyclovir.

[0194] Examples of parasiticides include, without limitation: antihalmintics, Radiopharmaceutics, gastrointestinal drugs.

[0195] Examples of hematologic compounds include, without limitation: immunoglobulins; blood clotting proteins; e.g., antihemophilic factor, factor IX complex; anticoagulants, e.g., dicumarol, heparin Na; fibrolysin inhibitors, tranexamic acid.

[0196] Examples of cardiovascular drugs include, without limitation: peripheral antiadrenergic drugs, centrally acting antihypertensive drugs, e.g., methyldopa, methyldopa HCl; antihypertensive direct vasodilators, e.g., diazoxide, hydralazine HCl; drugs affecting renin-angiotensin system; peripheral vasodilators, phentolamine; antianginal drugs; cardiac glycosides; inodilators; e.g., amrinone, milrinone, enoximone, fenoximone, imazodan, sulmazole; antidysrhythmic; calcium entry blockers; drugs affecting blood lipids; ranitidine, bosentan, rezulin.

[0197] Examples of respiratory drugs include, without limitation: sypathomimetic drugs: albuterol, bitolterol mesylate, dobutamine HCl, dopamine HCl, ephedrine SO, epinephrine, fenfluramine HCl, isoproterenol HCl, methoxamine HCl, norepinephrine bitartrate, phenylephrine HCl, ritodrine HCl; cholinomimetic drugs, e.g., acetylcholine Cl; anticholinesterases, e.g., edrophonium Cl; cholinesterase reactivators; adrenergic blocking drugs, e.g., acebutolol HCl, atenolol, esmolol HCl, labetalol HCl, metoprolol, nadolol, phentolamine mesylate, propanolol HCl; antimuscarinic drugs, e.g., anisotropine methylbromide, atropine SO4, clinidium Br, glycopyrrolate, ipratropium Br, scopolamine HBr.

[0198] Examples of neuromuscular blocking drugs include, without limitation: depolarizing, e.g., atracurium besylate, hexafluorenium Br, metocurine iodide, succinylcholine Cl, tubocurarine Cl, vecuronium Br; centrally acting muscle relaxants, e.g., baclofen.

[0199] Examples of neurotransmitters and neurotransmitter agents include, without limiation: acetylcholine, adenosine, adenosine triphosphate, amino acid neurotransmitters, e.g., excitatory amino acids, GABA, glycine; biogenic amine neurotransmitters, e.g., dopamine, epinephrine, histamine, norepinephrine, octopamine, serotonin, tyramine; neuropeptides, nitric oxide, K+ channel toxins,

[0200] Examples of antiparkinson drugs include, without limiation: amaltidine HCl, benztropine mesylate, e.g., carbidopa.

[0201] Examples of diuretic drugs include, without limitation: dichlorphenamide, methazolamide, bendroflumethiazide, polythiazide.

[0202] Examples of uterine, antimigraine drugs include, without limitation: carboprost tromethamine, mesylate, methysergide maleate.

[0203] Examples of hormones include, without limitation: pituitary hormones, e.g., chorionic gonadotropin, cosyntropin, menotropins, somatotropin, iorticotropin, protirelin, thyrotropin, vasopressin, lypressin; adrenal hormones, e.g., beclomethasone dipropionate, betamethasone, dexamethasone, triamcinolone; pancreatic hormones, e.g., glucagon, insulin; parathyroid hormone, e.g., dihydrochysterol; thyroid hormones, e.g., calcitonin etidronate disodium, levothyroxine Na, liothyronine Na, liotrix, thyroglobulin, teriparatide acetate; antithyroid drugs; estrogenic hormones; progestins and antagonists, hormonal contraceptives, testicular hormones; gastrointestinal hormones: cholecystokinin, enteroglycan, galanin, gastric inhibitory polypeptide, epidermal growth factor-urogastrone, gastric inhibitory polypeptide, gastrin-releasing peptide, gastrins, pentagastrin, tetragastrin, motilin, peptide YY, secretin, vasoactive intestinal peptide, sincalide.

[0204] Examples of enzymes include, without limitation: hyaluronidase, streptokinase, tissue plasminogen activator, urokinase, PGE-adenosine deaminase, oxidoreductases, transferases, polymerases, hydrolases, lyases, synthases, isomerases, and ligases, digestive enzymes (e.g., proteases, lipases, carbohydrases, and nucleases). In some embodiments, the enzyme is selected from the group consisting of lactase, beta-galactosidase, a pancreatic enzyme, an oil-degrading enzyme, mucinase, cellulase, isomaltase, alginase, digestive lipases (e.g., lingual lipase, pancreatic lipase, phospholipase), amylases, cellulases, lysozyme, proteases (e.g., pepsin, trypsin, chymotrypsin, carboxypeptidase, elastase), esterases (e.g. sterol esterase), disaccharidases (e.g., sucrase, lactase, beta-galactosidase, maltase, isomaltase), DNases, and RNases.

[0205] Examples of intravenous anesthetics include, without limitation: droperidol, etomidate, fetanyl citrate/droperidol, hexobarbital, ketamine HCl, methohexital Na, thiamylal Na, thiopental Na.

[0206] Examples of antiepileptics include, without limitation, carbamazepine, clonazepam, divalproex Na, ethosuximide, mephenytoin, paramethadione, phenytoin, primidone.

[0207] Examples of peptides and proteins that may be used as therapeutic agents include, without limiation: ankyrins, arrestins, bacterial membrane proteins, clathrin, connexins, dystrophin, endothelin receptor, spectrin, selectin, cytokines; chemokines; growth factors, insulin, erythropoietin (EPO), tumor necrosis factor (TNF), neuropeptides, neuropeptide Y, neurotensin, transforming growth factor alpha, transforming growth factor beta, interferon (IFN), and hormones, growth inhibitors, e.g., genistein, steroids etc; glycoproteins, e.g., ABC transporters, platelet glycoproteins, GPIb-IX complex, GPIIb-IIIa complex, vitronectin, thrombomodulin, CD4, CD55, CD58, CD59, CD44, lymphocye function-associated antigen, intercellular adhesion molecule, vascular cell adhesion molecule, Thy-1, antiporters, CA-15-3 antigen, fibronectins, laminin, myelin-associated glycoprotein, GAP, GAP-43, Exendin-4, and GLP-1.

[0208] Examples of cytokines and cytokine receptors include, without limitation: interleukin-1 (IL-1), IL-2, IL-3, IL-4, IL-5, IL-6, IL-7, IL-8, IL-9, IL-10, IL-11, IL-12, IL-13, IL-14, IL-15, IL-16, IL-17, IL-18, IL-1 receptor, IL-2 receptor, IL-3 receptor, IL-4 receptor, IL-5 receptor, IL-6 receptor, IL-7 receptor, IL-8 receptor, IL-9 receptor, IL-10 receptor, IL-11 receptor, IL-12 receptor, IL-13 receptor, IL-14 receptor, IL-15 receptor, IL-16 receptor, IL-17 receptor, IL-18 receptor, lymphokine inhibitory factor, macrophage colony stimulating factor, platelet derived growth factor, stem cell factor, tumor growth factor beta, tumor necrosis factor, lymphotoxin, Fas, granulocyte colony stimulating factor, granulocyte macrophage colony stimulating factor, interferon-alpha, interferon-beta, interferon-gamma.

[0209] Examples of growth factors and protein hormones include, without limitation: erythropoietin, angiogenin, hepatocyte growth factor, fibroblast growth factor, keratinocyte growth factor, nerve growth factor, tumor growth factor-alpha, thrombopoietin, thyroid stimulating factor, thyroid releasing hormone, neurotrophin, epidermal growth factor, VEGF, ciliary neurotrophic factor, LDL, somatomedin, insulin growth factor, insulin-like growth factor I and II.

[0210] Examples of chemokines include, without limitation: ENA-78, ELC, GRO-alpha, GRO-beta, GRO-gamma, HRG, LIF, IP-10, MCP-1, MCP-2, MCP-3, MCP-4, MIP-lalpha, MIP-lbeta, MIG, MDC, NT-3, NT-4, SCF, LIF, leptin, RANTES, lymphotactin, eotaxin-1, eotaxin-2, TARC, TECK, WAP-1, WAP-2, GCP-1, GCP-2; alpha-chemokine receptors: CXCR1, CXCR2, CXCR3, CXCR4, CXCR5, CXCR6, CXCR7; beta-chemokine receptors: CCR1, CCR2, CCR3, CCR4, CCR5, CCR6, CCR7.

[0211] In some embodiments, the therapeutic agent is a regulatory protein. A regulatory protein may be, in some embodiments, a transcription factor or a immunoregulatory protein. Non-limiting, exemplary transcriptional factors include: those of the NFkB family, such as Rel-A, c-Rel, Rel-B, p50 and p52; those of the AP-1 family, such as Fos, FosB, Fra-1, Fra-2, Jun, JunB and JunD; ATF; CREB; STAT-1, -2, -3, -4, -5 and -6; NFAT-1, -2 and -4; MAF; Thyroid Factor; IRF; Oct-1 and -2; NF-Y; Egr-1; and USF-43, EGR1, Spl, and E2F1.

[0212] In some embodiments, the therapeutic agent is an antiviral agent. Examples of antiviral agents include, without limitation: reverse transcriptase inhibitors and nucleoside analogs, e.g. ddI, ddC, 3TC, ddA, AZT; protease inhibitors, e.g., Invirase, ABT-538; inhibitors of in RNA processing, e.g., ribavirin.

[0213] Other non-limiting examples of known therapeutics which may be delivered by coupling to a glycosphingolipid a ceramide structure described herein include:

[0214] (a) Capoten, Monopril, Pravachol, Avapro, Plavix, Cefzil, Duricef/Ultracef, Azactam, Videx, Zerit, Maxipime, VePesid, Paraplatin, Platinol, Taxol, UFT, Buspar, Serzone, Stadol NS, Estrace, Glucophage (Bristol-Myers Squibb);

[0215] (b) Ceclor, Lorabid, Dynabac, Prozac, Darvon, Permax, Zyprexa, Humalog, Axid, Gemzar, Evista (Eli Lily);

[0216] (c) Vasotec/Vaseretic, Mevacor, Zocor, Prinivil/Prinizide, Plendil, Cozaar/Hyzaar, Pepcid, Prilosec, Primaxin, Noroxin, Recombivax HB, Varivax, Timoptic/XE, Trusopt, Proscar, Fosamax, Sinemet, Crixivan, Propecia, Vioxx, Singulair, Maxalt, Ivermectin (Merck & Co.);

[0217] (d) Diflucan, Unasyn, Sulperazon, Zithromax, Trovan, Procardia XL, Cardura, Norvasc, Dofetilide, Feldene, Zoloft, Zeldox, Glucotrol XL, Zyrtec, Eletriptan, Viagra, Droloxifene, Aricept, Lipitor (Pfizer);

[0218] (e) Vantin, Rescriptor, Vistide, Genotropin, Micronase/Glyn./Glyb., Fragmin, Total Medrol, Xanax/alprazolam, Sermion, Halcion/triazolam, Freedox, Dostinex, Edronax, Mirapex, Pharmorubicin, Adriamycin, Camptosar, Remisar, Depo-Provera, Caverject, Detrusitol, Estring, Healon, Xalatan, Rogaine (Pharmacia & Upjohn);

[0219] (f) Lopid, Accrupil, Dilantin, Cognex, Neurontin, Loestrin, Dilzem, Fempatch, Estrostep, Rezulin, Lipitor, Omnicef, FemHRT, Suramin, Clinafloxacin (Warner Lambert).

[0220] Further non-limiting examples of therapeutic agents which may be delivered by the glycosphingolipid-therapeutic agent complex of the present invention may be found in: Goodman and Gilman's The Pharmacological Basis of Therapeutics. 9th ed. McGraw-Hill 1996, incorporated herein by reference.

[0221] In some embodiments, the agent is a diagnostic agent. A “diagnostic agent” refers to an agent that is used for diagnostic purpose, e.g., by detecting another molecule in a cell or a tissue. In some embodiments, the diagnostic agent is an agent that targets (e.g., binds) a biomarker known to be associated with a disease (e.g., a nucleic acid biomarker, protein biomarker, or a metabolite biomarker) in a subject and produces a detectable signal, which can be used to determine the presence/absence of the biomarker, thus to diagnose a disease. For example, the diagnostic agent may be, without limitation, an antibody or an antisense nucleic acid.

[0222] In some embodiments, the diagnostic agent contains a detectable molecule. A detectable molecule refers to a moiety that has at least one element, isotope, or a structural or functional group incorporated that enables detection of a molecule, e.g., a protein or polypeptide, or other entity, to which the diagnostic agent binds. In some embodiments, a detectable molecule falls into any one (or more) of five classes: a) an agent which contains isotopic moieties, which may be radioactive or heavy isotopes, including, but not limited to, 2H, 3H, 13C, 14C, 15N, 18F, 31P, 32P, 35S, 67Ga, 76Br, 99mTc (Tc-99m), 111In, 123I, 125I, 131I, 153Gd, 169Yb, and 186Re; b) an agent which contains an immune moiety, which may be an antibody or antigen, which may be bound to an enzyme (e.g., such as horseradish peroxidase); c) an agent comprising a colored, luminescent, phosphorescent, or fluorescent moiety (e.g., such as the fluorescent label fluoresceinisothiocyanat (FITC); d) an agent which has one or more photo affinity moieties; and e) an agent which is a ligand for one or more known binding partners (e.g., biotin-streptavidin, His-NiTNAFK506-FKBP). In some embodiments, a detectable molecule comprises a radioactive isotope. In some embodiments, a detection agent comprises a fluorescent moiety. In some embodiments, the detectable molecule comprises a dye, e.g., a fluorescent dye, e.g., fluorescein isothiocyanate, Texas red, rhodamine, Cy3, Cy5, Cy5.5, Alexa 647 and derivatives. In some embodiments, the detectable molecule comprises biotin. In some embodiments, the detectable molecule is a fluorescent polypeptide (e.g., GFP or a derivative thereof such as enhanced GFP (EGFP)) or a luciferase (e.g., a firefly, Renilla, or Gaussia luciferase). In some embodiments, a detectable molecule may react with a suitable substrate (e.g., a luciferin) to generate a detectable signal. Non-limiting examples of fluorescent proteins include GFP and derivatives thereof, proteins comprising chromophores that emit light of different colors such as red, yellow, and cyan fluorescent proteins, etc. Exemplary fluorescent proteins include, e.g., Sirius, Azurite, EBFP2, TagBFP, mTurquoise, ECFP, Cerulean, TagCFP, mTFP1, mUkG1, mAG1, AcGFP1, TagGFP2, EGFP, mWasabi, EmGFP, TagYPF, EYFP, Topaz, SYFP2, Venus, Citrine, mKO, mKO2, mOrange, mOrange2, TagRFP, TagRFP-T, mStrawberry, mRuby, mCherry, mRaspberry, mKate2, mPlum, mNeptune, T-Sapphire, mAmetrine, mKeima. See, e.g., Chalfie, M. and Kain, S R (eds.) Green fluorescent protein: properties, applications, and protocols (Methods of biochemical analysis, v. 47, Wiley-Interscience, and Hoboken, N.J., 2006, and/or Chudakov, D M, et al., Physiol Rev. 90(3):1103-63, 2010, incorporated herein by reference, for discussion of GFP and numerous other fluorescent or luminescent proteins. In some embodiments, a detectable molecule comprises a dark quencher, e.g., a substance that absorbs excitation energy from a fluorophore and dissipates the energy as heat.

[0223] Other aspects of the present disclosure provide compositions comprising any of the catalytically inactive BoNT-like toxin described herein (e.g., ^{ci}LC-Hn/X, ^{ci}LC-Hn/En, ^{ci}BoNT/XA, ^{ci}BoNT/XB, ^{ci}BoNT/XC, ^{ci}BoNT/XD, ^{ci}BoNT/XE, ^{ci}BoNT/XF, ^{ci}BoNT/XG, ^{ci}BoNT/XH, ^{ci}BoNT/EnA, ^{ci}BoNT/EnB, ^{ci}BoNT/EnC, ^{ci}BoNT/EnD, ^{ci}BoNT/EnE, ^{ci}BoNT/EnF, ^{ci}BoNT/EnG, or ^{ci}BoNT/EnH) or any the complexes comprising any of the catalytically inactive BoNT-like toxin described herein associated with an agent (e.g., a BoNT neutralizing antibody such as an anti-BoNT/A VHH). In some embodiments, the composition is a pharmaceutical composition. In some embodiments, the pharmaceutical composition further comprises other therapeutic agents suitable for the specific disease such composition is designed to treat. In some embodiments, the pharmaceutically composition of the present disclosure further comprises a pharmaceutically-acceptable carrier.

[0224] The term “pharmaceutically-acceptable carrier”, as used herein, means a pharmaceutically-acceptable material, composition or vehicle, such as a liquid or solid filler, diluent, excipient, manufacturing aid (e.g., lubricant, talc magnesium, calcium or zinc stearate, or steric acid), or solvent encapsulating material, involved in carrying or transporting the polypeptide from one site (e.g., the delivery site) of the body, to another site (e.g., organ, tissue or portion of the body).

[0225] A pharmaceutically acceptable carrier is “acceptable” in the sense of being compatible with the other ingredients of the formulation and not injurious to the tissue of the subject (e.g., physiologically compatible, sterile, physiologic pH, etc.). Some examples of materials which can serve as pharmaceutically-acceptable carriers include: (1) sugars, such as lactose, glucose and sucrose; (2) starches, such as corn starch and potato starch; (3) cellulose, and its derivatives, such as sodium carboxymethylcellulose, methylcellulose, ethyl cellulose, microcrystalline cellulose and cellulose acetate; (4) powdered tragacanth; (5) malt; (6) gelatin; (7) lubricating agents, such as magnesium stearate, sodium lauryl sulfate and talc; (8) excipients, such as cocoa butter and suppository waxes; (9) oils, such as peanut oil, cottonseed oil, safflower oil, sesame oil, olive oil, corn oil and soybean oil; (10) glycols, such as propylene glycol; (11) polyols, such as glycerin, sorbitol, mannitol and polyethylene glycol (PEG); (12) esters, such as ethyl oleate and ethyl laurate; (13) agar; (14) buffering agents, such as magnesium hydroxide and aluminum hydroxide; (15) alginic acid; (16) pyrogen-free water; (17) isotonic saline; (18) Ringer's solution; (19) ethyl alcohol; (20) pH buffered solutions; (21) polyesters, polycarbonates and/or polyanhydrides; (22) bulking agents, such as polypeptides and amino acids (23) serum component, such as serum albumin, HDL and LDL; (22) C2-C12 alcohols, such as ethanol; and (23) other non-toxic compatible substances employed in pharmaceutical formulations. Wetting agents, coloring agents, release agents, coating agents, sweetening agents, flavoring agents, perfuming agents, preservative and antioxidants can also be present in the formulation. The terms such as “excipient”, “carrier”, “pharmaceutically acceptable carrier” or the like are used interchangeably herein. In some embodiments, a BoNT polypeptide of the present disclosure in a composition is administered by injection, by means of a catheter, by means of a suppository, or by means of an implant, the implant being of a porous, non-porous, or gelatinous material, including a membrane, such as a sialastic membrane, or a fiber.

[0226] Typically, when administering the composition, materials to which the catalytically inactive BoNT-like toxin or the complex of the disclosure does not absorb are used. In other embodiments, the BoNT polypeptides of the present disclosure are delivered in a controlled release system. Such compositions and methods for administration are provides in U.S. Patent publication No. 2007/0020295, the contents of which are herein incorporated by reference. In one embodiment, a pump may be used (see, e.g., Langer, 1990, Science 249:1527-1533; Sefton, 1989, CRC Crit. Ref. Biomed. Eng. 14:201; Buchwald et al., 1980, Surgery 88:507; Saudek et al., 1989, N. Engl. J. Med. 321:574). In another embodiment, polymeric materials can be used. (See, e.g., Medical Applications of Controlled Release (Langer and Wise eds., CRC Press, Boca Raton, Fla., 1974); Controlled Drug Bioavailability, Drug Product Design and Performance (Smolen and Ball eds., Wiley, New York, 1984); Ranger and Peppas, 1983, Macromol. Sci. Rev. Macromol. Chem. 23:61. See also Levy et al., 1985, Science 228:190; During et al., 1989, Ann. Neurol. 25:351; Howard et al., 1989, J. Neurosurg. 71:105.) Other controlled release systems are discussed, for example, in Langer, supra.

[0227] The catalytically inactive BoNT-like toxin or the complex of the present disclosure can be administered as pharmaceutical compositions comprising a therapeutically effective amount of a binding agent and one or more pharmaceutically compatible ingredients. In typical embodiments, the pharmaceutical composition is formulated in accordance with routine procedures as a pharmaceutical composition adapted for intravenous or subcutaneous administration to a subject, e.g., a human being.

[0228] Typically, compositions for administration by injection are solutions in sterile isotonic aqueous buffer. Where necessary, the pharmaceutical can also include a solubilizing agent and a local anesthetic such as lignocaine to ease pain at the site of the injection. Generally, the ingredients are supplied either separately or mixed together in unit dosage form, for example, as a dry lyophilized powder or water free concentrate in a hermetically sealed container such as an ampoule or sachette indicating the quantity of active agent. Where the pharmaceutical is to be administered by infusion, it can be dispensed with an infusion bottle containing sterile pharmaceutical grade water or saline. Where the pharmaceutical is administered by injection, an ampoule of sterile water for injection or saline can be provided so that the ingredients can be mixed prior to administration. A pharmaceutical composition for systemic administration may be a liquid, e.g., sterile saline, lactated Ringer's or Hank's solution. In addition, the pharmaceutical composition can be in solid forms and re-dissolved or suspended immediately prior to use. Lyophilized forms are also contemplated. The pharmaceutical composition can be contained within a lipid particle or vesicle, such as a liposome or microcrystal, which is also suitable for parenteral administration. The particles can be of any suitable structure, such as unilamellar or plurilamellar, so long as compositions are contained therein.

[0229] The catalytically inactive BoNT or the compolex of the present disclosure can be entrapped in ‘stabilized plasmid-lipid particles’ (SPLP) containing the fusogenic lipid dioleoylphosphatidylethanolamine (DOPE), low levels (5-10 mol %) of cationic lipid, and stabilized by a polyethyleneglycol (PEG) coating (Zhang Y. P. et al., Gene Ther. 1999, 6:1438-47). Positively charged lipids such as N-[1-(2,3-dioleoyloxi)propyl]-N,N,N-trimethyl-amoniummethylsulfate, or “DOTAP,” are particularly preferred for such particles and vesicles. The preparation of such lipid particles is well known. See, e.g., U.S. Pat. Nos. 4,880,635; 4,906,477; 4,911,928; 4,917,951; 4,920,016; and 4,921,757. The pharmaceutical compositions of the present disclosure may be administered or packaged as a unit dose, for example.

[0230] The term “unit dose” when used in reference to a pharmaceutical composition of the present disclosure refers to physically discrete units suitable as unitary dosage for the subject, each unit containing a predetermined quantity of active material calculated to produce the desired therapeutic effect in association with the required diluent; i.e., carrier, or vehicle. In some embodiments, the BoNT/X polypeptides described herein may be conjugated to a therapeutic moiety, e.g., an antibiotic. TecH_{N}iques for conjugating such therapeutic moieties to polypeptides, including e.g., Fc domains, are well known; see, e.g., Amon et al., “Monoclonal Antibodies For Immunotargeting Of Drugs In Cancer Therapy”, in Monoclonal Antibodies And Cancer Therapy, Reisfeld et al. (eds.), 1985, pp. 243-56, Alan R. Liss, Inc.); Hellstrom et al., “Antibodies For Drug Delivery”, in Controlled Drug Delivery (2nd Ed.), Robinson et al. (eds.), 1987, pp. 623-53, Marcel Dekker, Inc.); Thorpe, “Antibody Carriers Of Cytotoxic Agents In Cancer Therapy: A Review”, in Monoclonal Antibodies '84: Biological And Clinical Applications, Pinchera et al. (eds.), 1985, pp. 475-506); “Analysis, Results, And Future Prospective Of The Therapeutic Use Of Radiolabeled Antibody In Cancer Therapy”, in Monoclonal Antibodies For Cancer Detection And Therapy, Baldwin et al. (eds.), 1985, pp. 303-16, Academic Press; and Thorpe et al. (1982) “The Preparation And Cytotoxic Properties Of Antibody-Toxin Conjugates,” Immunol. Rev., 62:119-158. Further, the pharmaceutical composition can be provided as a pharmaceutical kit comprising (a) a container containing a polypeptide of the disclosure in lyophilized form and (b) a second container containing a pharmaceutically acceptable diluent (e.g., sterile water) for injection. The pharmaceutically acceptable diluent can be used for reconstitution or dilution of the lyophilized polypeptide of the disclosure. Optionally associated with such container(s) can be a notice in the form prescribed by a governmental agency regulating the manufacture, use or sale of pharmaceuticals or biological products, which notice reflects approval by the agency of manufacture, use or sale for human administration. In another aspect, an article of manufacture containing materials useful for the treatment of the diseases described above is included. In some embodiments, the article of manufacture comprises a container and a label.

[0231] Suitable containers include, for example, bottles, vials, syringes, and test tubes. The containers may be formed from a variety of materials such as glass or plastic. In some embodiments, the container holds a composition that is effective for treating a disease described herein and may have a sterile access port. For example, the container may be an intravenous solution bag or a vial having a stopper pierceable by a hypodermic injection needle. The active agent in the composition is an isolated polypeptide of the disclosure. In some embodiments, the label on or associated with the container indicates that the composition is used for treating the disease of choice. The article of manufacture may further comprise a second container comprising a pharmaceutically-acceptable buffer, such as phosphate-buffered saline, Ringer's solution, or dextrose solution. It may further include other materials desirable from a commercial and user standpoint, including other buffers, diluents, filters, needles, syringes, and package inserts with instructions for use.

[0232] The catalytically inactive BoNT-like toxin described herein can enter cells. For example, the ^{ci}LC-Hn/X or ^{ci}LC-Hn/En can enter cells non-specifically (i.e., not targeting a certain cell type). In some embodiments, the chimeric BoNT-like toxins (e.g., ^{ci}BoNT/XA, ^{ci}BoNT/XB, ^{ci}BoNT/XC, ^{ci}BoNT/XD, ^{ci}BoNT/XE, ^{ci}BoNT/XF, ^{ci}BoNT/XG, ^{ci}BoNT/XH, ^{ci}BoNT/EnA, ^{ci}BoNT/EnB, ^{ci}BoNT/EnC, ^{ci}BoNT/EnD, ^{ci}BoNT/EnE, ^{ci}BoNT/EnF, ^{ci}BoNT/EnG, or ^{ci}BoNT/EnH) targets neurons via its receptor binding domain. The present disclosure provide the use of the catalytically inactive BoNT-like toxin described herein (e.g., ^{ci}LC-Hn/X, ^{ci}LC-Hn/En, ^{ci}BoNT/XA, ^{ci}BoNT/XB, ^{ci}BoNT/XC, ^{ci}BoNT/XD, ^{ci}BoNT/XE, ^{ci}BoNT/XF, ^{ci}BoNT/XG, ^{ci}BoNT/XH, ^{ci}BoNT/EnA, ^{ci}BoNT/EnB, ^{ci}BoNT/EnC, ^{ci}BoNT/EnD, ^{ci}BoNT/EnE, ^{ci}BoNT/EnF, ^{ci}BoNT/EnG, or ^{ci}BoNT/EnH) for delivering an agent (e.g., a therapeutic agent or a diagnostic agent) to a cell (e.g., a neuron). The present disclosure further provides the use of the complex comprising the catalytically inactive BoNT-like toxin described herein (e.g., ^{ci}LC-Hn/X, ^{ci}LC-Hₙ/En, ^{ci}BoNT/XA, ^{ci}BoNT/XB, ^{ci}BoNT/XC, ^{ci}BoNT/XD, ^{ci}BoNT/XE, ^{ci}BoNT/XF, ^{ci}BoNT/XG, ^{ci}BoNT/XH, ^{ci}BoNT/EnA, ^{ci}BoNT/EnB, ^{ci}BoNT/EnC, ^{ci}BoNT/EnD, ^{ci}BoNT/EnE, ^{ci}BoNT/EnF, ^{ci}BoNT/EnG, or ^{ci}BoNT/EnH) associated with the agent (e.g., a therapeutic agent or a diagnostic agent) for treating or diagnosing a disease.

[0233] In some embodiments, methods of delivering an agent (e.g., a therapeutic agent or a diagnostic agent) to a cell (e.g., a neuron) comprises contacting the cell (e.g., a neuron) with the complex comprising the catalytically inactive BoNT-like toxin described herein (e.g., ^{ci}LC-Hn/X, ^{ci}LC-Hn/En, ^{ci}BoNT/XA, ^{ci}BoNT/XB, ^{ci}BoNT/XC, ^{ci}BoNT/XD, ^{ci}BoNT/XE, ^{ci}BoNT/XF, ^{ci}BoNT/XG, ^{ci}BoNT/XH, ^{ci}BoNT/EnA, ^{ci}BoNT/EnB, ^{ci}BoNT/EnC, ^{ci}BoNT/EnD, ^{ci}BoNT/EnE, ^{ci}BoNT/EnF, ^{ci}BoNT/EnG, or ^{ci}BoNT/EnH) associated with the agent (e.g., a therapeutic agent or a diagnostic agent). In some embodiments, the contacting is in vitro (e.g., in cultured cells). In some embodiments, the contacting is ex vivo (e.g., in cells isolated from a subject). In some embodiments, the contacting is in vivo (e.g., in cells in a subject).

[0234] The catalytically inactive BoNT-like toxins described herein (e.g., ^{ci}LC-Hn/X, ^{ci}LC-Hn/En, ^{ci}BoNT/XA, ^{ci}BoNT/XB, ^{ci}BoNT/XC, ^{ci}BoNT/XD, ^{ci}BoNT/XE, ^{ci}BoNT/XF, ^{ci}BoNT/XG, ^{ci}BoNT/XH, ^{ci}BoNT/EnA, ^{ci}BoNT/EnB, ^{ci}BoNT/EnC, ^{ci}BoNT/EnD, ^{ci}BoNT/EnE, ^{ci}BoNT/EnF, ^{ci}BoNT/EnG, or ^{ci}BoNT/EnH) are particularly suitable for use as a delivery vehicle to deliver agents in to cells (e.g., neurons) because it shows minimal residual toxicity, which is a major challenger in all other existing BoNT-mediated delivery methods (e.g., using catalytically inactive BoNT/A, BoNT/B, BoNT/C, BoNT/D, BoNT/E, BoNT/F, BoNT/G, or BoNT/H).

[0235] A “neuron” refers to an electrically excitable cell that communicates with other cells via specialized connections called synapses. A neuron may be a sensory neuron or a motor neuron. Sensory neurons respond to stimulus such as touch, sound, or light that affect the cells of the sensory organs and sends signals to the spinal cord or brain. Motor neurons receive signals from the brain and spinal cord to control everything from muscle contractions to glandular output. Interneurons connect neurons to other neurons within the same region of the brain or spinal cord in neural networks. A typical neuron consists of a cell body (soma), dendrites, and a single axon.

[0236] Other aspects of the present disclosure provide methods of diagnosing/treating a disease. In some embodiments, a method of diagnosing a disease comprises administering to a subject in need thereof an effective amount of the complex comprising the catalytically inactive BoNT-like toxin described herein (e.g., ^{ci}LC-Hn/X, ^{ci}LC-Hn/En, ^{ci}BoNT/XA, ^{ci}BoNT/XB, ^{ci}BoNT/XC, ^{ci}BoNT/XD, ^{ci}BoNT/XE, ^{ci}BoNT/XF, ^{ci}BoNT/XG, ^{ci}BoNT/XH, ^{ci}BoNT/EnA, ^{ci}BoNT/EnB, ^{ci}BoNT/EnC, ^{ci}BoNT/EnD, ^{ci}BoNT/EnE, ^{ci}BoNT/EnF, ^{ci}BoNT/EnG, or ^{ci}BoNT/EnH) associated with a diagnostic agent. In some embodiments, the method of diagnosing a disease further comprise detecting a signal produced by the diagnostic agent, thus to diagnose the disease.

[0237] In some embodiments, a method of treating a disease comprises administering to a subject in need thereof an effective amount of the complex comprising the catalytically inactive BoNT-like toxins described herein (e.g., ^{ci}LC-Hn/X, ^{ci}LC-Hn/En, ^{ci}BoNT/XA, ^{ci}BoNT/XB, ^{ci}BoNT/XC, ^{ci}BoNT/XD, ^{ci}BoNT/XE, ^{ci}BoNT/XF, ^{ci}BoNT/XG, ^{ci}BoNT/XH, ^{ci}BoNT/EnA, ^{ci}BoNT/EnB, ^{ci}BoNT/EnC, ^{ci}BoNT/EnD, ^{ci}BoNT/EnE, ^{ci}BoNT/EnF, ^{ci}BoNT/EnG, or ^{ci}BoNT/EnH) associated with a therapeutic agent.

[0238] The terms “treatment,” “treat,” and “treating” refer to reversing, alleviating, delaying the onset of, or inhibiting the progress of a disease described herein (e.g., cancer or an autoimmune disease). In some embodiments, treatment may be administered after one or more signs or symptoms of the disease have developed or have been observed. In other embodiments, treatment may be administered in the absence of signs or symptoms of the disease. For example, treatment may be administered to a susceptible subject prior to the onset of symptoms (e.g., in light of a history of symptoms and/or in light of exposure to a pathogen). Treatment may also be continued after symptoms have resolved, for example, to delay or prevent recurrence. Prophylactic treatment refers to the treatment of a subject who is not and was not with a disease but is at risk of developing the disease or who was with a disease, is not with the disease, but is at risk of regression of the disease. In some embodiments, the subject is at a higher risk of developing the disease or at a higher risk of regression of the disease than an average healthy member of a population.

[0239] An “effective amount” refers to an amount sufficient to elicit the desired biological response. An effective amount may vary depending on such factors as the desired biological endpoint, the pharmacokinetics of the compound, the condition being treated, the mode of administration, and the age and health of the subject. In some embodiments, an effective amount is a therapeutically effective amount. In some embodiments, an effective amount is a prophylactic treatment. In some embodiments, an effective amount is the amount of an agent in a single dose. In some embodiments, an effective amount is the combined amounts of an agent described herein in multiple doses. When an effective amount is referred to herein, it means the amount is prophylactically and/or therapeutically effective, depending on the subject and/or the disease to be treated. Determining the effective amount or dosage is within the abilities of one skilled in the art.

[0240] The terms “administer,” “administering,” or “administration” refers to implanting, absorbing, ingesting, injecting, inhaling, or otherwise introducing a compound described herein, or a composition thereof, in or on a subject. The complexes described herein, or composition(s) containing such complexes may be administered systemically (e.g., via intravenous injection) or locally (e.g., via local injection). In some embodiments, the complex or the composition comprising such complex described herein is administered via injection, e.g., intravenously, or sublingually. Parenteral administration is also contemplated. The term “parenteral” as used herein includes subcutaneous, intracutaneous, intravenous, intramuscular, intraarticular, intraarterial, intrasynovial, intrasternal, intrathecal, intralesional, intradermally, and intracranial injection or infusion techniques.

[0241] Empirical considerations, such as the half-life, generally will contribute to the determination of the dosage. For example, therapeutic agents that are compatible with the human immune system, such as polypeptides comprising regions from humanized antibodies or fully human antibodies, may be used to prolong half-life of the polypeptide and to prevent the polypeptide being attacked by the host's immune system. Frequency of administration may be determined and adjusted over the course of therapy, and is generally, but not necessarily, based on treatment and/or suppression and/or amelioration and/or delay of a disease. Alternatively, sustained continuous release formulations of a polypeptide may be appropriate. Various formulations and devices for achieving sustained release are known in the art.

[0242] In some embodiments, dosage is daily, every other day, every three days, every four days, every five days, or every six days. In some embodiments, dosing frequency is once every week, every 2 weeks, every 4 weeks, every 5 weeks, every 6 weeks, every 7 weeks, every 8 weeks, every 9 weeks, or every 10 weeks; or once every month, every 2 months, or every 3 months, or longer. The progress of this therapy is easily monitored by conventional techniques and assays. The dosing regimen (including the polypeptide used) can vary over time.

[0243] In some embodiments, for an adult subject of normal weight, doses ranging from about 0.01 to 1000 mg/kg may be administered. In some embodiments, the dose is between 1 to 200 mg. The particular dosage regimen, i.e., dose, timing and repetition, will depend on the particular subject and that subject's medical history, as well as the properties of the polypeptide (such as the half-life of the polypeptide, and other considerations well known in the art).

[0244] For the purpose of the present disclosure, the appropriate dosage of will depend on the specific agent (or compositions thereof) employed, the formulation and route of administration, the type and severity of the disease, whether the polypeptide is administered for preventive or therapeutic purposes, previous therapy, the subject's clinical history and response to the antagonist, and the discretion of the attending physician. Typically the clinician will administer a polypeptide until a dosage is reached that achieves the desired result. Administration of one or more polypeptides can be continuous or intermittent, depending, for example, upon the recipient's physiological condition, whether the purpose of the administration is therapeutic or prophylactic, and other factors known to skilled practitioners. The administration of an agent may be essentially continuous over a preselected period of time or may be in a series of spaced dose, e.g., either before, during, or after developing a disease.

[0245] “A subject in need thereof”, refers to an individual who has a disease, a symptom of the disease, or a predisposition toward the disease, with the purpose to cure, heal, alleviate, relieve, alter, remedy, ameliorate, improve, or affect the disease, the symptom of the disease, or the predisposition toward the disease.

[0246] A “subject” to which administration is contemplated refers to a human (i.e., male or female of any age group, e.g., pediatric subject (e.g., infant, child, or adolescent) or adult subject (e.g., young adult, middleaged adult, or senior adult)) or nonhuman animal. In some embodiments, the nonhuman animal is a mammal (e.g., rodent (e.g., mouse or rat), primate (e.g., cynomolgus monkey or rhesus monkey), commercially relevant mammal (e.g., cattle, pig, horse, sheep, goat, cat, or dog), or bird (e.g., commercially relevant bird, such as chicken, duck, goose, or turkey)). The non-human animal may be a male or female at any stage of development. The non-human animal may be a transgenic animal or genetically engineered animal.

[0247] In some embodiments, the subject is a companion animal (a pet). “A companion animal,” as used herein, refers to pets and other domestic animals. Non-limiting examples of companion animals include dogs and cats; livestock such as horses, cattle, pigs, sheep, goats, and chickens; and other animals such as mice, rats, guinea pigs, and hamsters. In some embodiments, the subject is a research animal. Non-limiting examples of research animals include: rodents (e.g., rats, mice, guinea pigs, and hamsters), rabbits, or non-human primates.

[0248] Alleviating a disease includes delaying the development or progression of the disease, or reducing disease severity. Alleviating the disease does not necessarily require curative results. As used therein, “delaying” the development of a disease means to defer, hinder, slow, retard, stabilize, and/or postpone progression of the disease. This delay can be of varying lengths of time, depending on the history of the disease and/or individuals being treated. A method that “delays” or alleviates the development of a disease, or delays the onset of the disease, is a method that reduces probability of developing one or more symptoms of the disease in a given time frame and/or reduces extent of the symptoms in a given time frame, when compared to not using the method. Such comparisons are typically based on clinical studies, using a number of subjects sufficient to give a statistically significant result.

[0249] “Development” or “progression” of a disease means initial manifestations and/or ensuing progression of the disease. Development of the disease can be detectable and assessed using standard clinical techniques as well known in the art. However, development also refers to progression that may be undetectable. For purpose of this disclosure, development or progression refers to the biological course of the symptoms. “Development” includes occurrence, recurrence, and onset. As used herein “onset” or “occurrence” of a disease includes initial onset and/or recurrence.

[0250] In some embodiments, the disease treated using the complex comprising the catalytically inactive BoNT-like toxin (e.g., ^{ci}BoNT/XA or ^{ci}BoNT/EnA as described herein) associated with a therapeutic agent is botulism, and the therapeutic agent is an BoNT-neutralizing antibody (e.g., an anti-BoNT/A VHH as described herein). “Botulism” is a serious illness caused by a BoNT that is active or having residual activity. The toxin causes paralysis. Paralysis starts in the face and spreads to the limbs. If it reaches the breathing muscles, respiratory failure can result. In some embodiments, the subject who has botulism has been administered a BoNT for treatment of another condition, or have been in contact with a BoNT (e.g., in contact with a substance contaminated with Clostridium botulinum. The strategies described herein are advantageous because the complex can enter neurons and neutralize BoNTs in the neurons that are causing botulism, and the catalytically inactive BoNTs used as delivery vehicles do not have residual toxicity.

[0251] In some embodiments, for treating botulism, the complex administered to the subject in need thereof comprises a first polypeptide comprising an amino acid sequence that is at least 80%, at least 81%, at least 82%, at least 83%, at least 84%, at least 85%, at least 86%, at least 87%, at least 88%, at least 89%, at least 90%, at least 91%, at least 92%, at least 93%, at least 94%, at least 95%, at least 96%, at least 97%, at least 98%, at least 99%, or at least 99.5% identical to the amino acid sequence of SEQ ID NO: 61 or SEQ ID NO: 62, and a second polypeptide comprising an amino acid sequence that is at least 80%, at least 81%, at least 82%, at least 83%, at least 84%, at least 85%, at least 86%, at least 87%, at least 88%, at least 89%, at least 90%, at least 91%, at least 92%, at least 93%, at least 94%, at least 95%, at least 96%, at least 97%, at least 98%, at least 99%, or at least 99.5% identical to the amino acid sequence of any one of SEQ ID NOs: 40-47, wherein the first polypeptide and the second polypeptide are linked via disulfide bond. In some embodiments, for treating botulism, the complex administered to the subject in need thereof comprises a first polypeptide comprising the amino acid sequence of SEQ ID NO: 61 and a second polypeptide comprising the amino acid sequence of any one of SEQ ID NOs: 40-47, wherein the first polypeptide and the second polypeptide are linked via disulfide bond. In some embodiments, for treating botulism, the complex administered to the subject in need thereof comprises a first polypeptide comprising the amino acid sequence of SEQ ID NO: 62 and a second polypeptide comprising the amino acid sequence of any one of SEQ ID NOs: 40-47, wherein the first polypeptide and the second polypeptide are linked via disulfide bond. In some embodiments, for treating botulism, the complex administered to the subject in need thereof comprises a first polypeptide comprising the amino acid sequence of SEQ ID NO: 61 and a second polypeptide comprising the amino acid sequence of SEQ ID NO: 40, wherein the first polypeptide and the second polypeptide are linked via disulfide bond.

[0252] In some embodiments, for treating botulism, the complex administered to the subject in need thereof comprises a first polypeptide comprising an amino acid sequence that is at least 80%, at least 81%, at least 82%, at least 83%, at least 84%, at least 85%, at least 86%, at least 87%, at least 88%, at least 89%, at least 90%, at least 91%, at least 92%, at least 93%, at least 94%, at least 95%, at least 96%, at least 97%, at least 98%, at least 99%, or at least 99.5% identical to the amino acid sequence of SEQ ID NO: 124 or SEQ ID NO: 125, and a second polypeptide comprising an amino acid sequence that is at least 80%, at least 81%, at least 82%, at least 83%, at least 84%, at least 85%, at least 86%, at least 87%, at least 88%, at least 89%, at least 90%, at least 91%, at least 92%, at least 93%, at least 94%, at least 95%, at least 96%, at least 97%, at least 98%, at least 99%, or at least 99.5% identical to the amino acid sequence of any one of SEQ ID NOs: 40-47, wherein the first polypeptide and the second polypeptide are linked via disulfide bond. In some embodiments, for treating botulism, the complex administered to the subject in need thereof comprises a first polypeptide comprising the amino acid sequence of SEQ ID NO: 124 and a second polypeptide comprising the amino acid sequence of any one of SEQ ID NOs: 40-47, wherein the first polypeptide and the second polypeptide are linked via disulfide bond. In some embodiments, for treating botulism, the complex administered to the subject in need thereof comprises a first polypeptide comprising the amino acid sequence of SEQ ID NO: 125 and a second polypeptide comprising the amino acid sequence of any one of SEQ ID NOs: 40-47, wherein the first polypeptide and the second polypeptide are linked via disulfide bond. In some embodiments, for treating botulism, the complex administered to the subject in need thereof comprises a first polypeptide comprising the amino acid sequence of SEQ ID NO: 124 and a second polypeptide comprising the amino acid sequence of SEQ ID NO: 40, wherein the first polypeptide and the second polypeptide are linked via disulfide bond.

[0253] In some embodiments, for treating botulism, the complex administered to the subject in need thereof comprises a first polypeptide comprising an amino acid sequence that is at least 80%, at least 81%, at least 82%, at least 83%, at least 84%, at least 85%, at least 86%, at least 87%, at least 88%, at least 89%, at least 90%, at least 91%, at least 92%, at least 93%, at least 94%, at least 95%, at least 96%, at least 97%, at least 98%, at least 99%, or at least 99.5% identical to the amino acid sequence of SEQ ID NO: 63 or SEQ ID NO: 64, and a second polypeptide comprising an amino acid sequence that is at least 80%, at least 81%, at least 82%, at least 83%, at least 84%, at least 85%, at least 86%, at least 87%, at least 88%, at least 89%, at least 90%, at least 91%, at least 92%, at least 93%, at least 94%, at least 95%, at least 96%, at least 97%, at least 98%, at least 99%, or at least 99.5% identical to the amino acid sequence of any one of SEQ ID NOs: 49-56, wherein the first polypeptide and the second polypeptide are linked via disulfide bond. In some embodiments, for treating botulism, the complex administered to the subject in need thereof comprises a first polypeptide comprising the amino acid sequence of SEQ ID NO: 63 and a second polypeptide comprising the amino acid sequence of any one of SEQ ID NOs: 49-56, wherein the first polypeptide and the second polypeptide are linked via disulfide bond. In some embodiments, for treating botulism, the complex administered to the subject in need thereof comprises a first polypeptide comprising the amino acid sequence of SEQ ID NO: 64 and a second polypeptide comprising the amino acid sequence of any one of SEQ ID NOs: 49-56, wherein the first polypeptide and the second polypeptide are linked via disulfide bond. In some embodiments, for treating botulism, the complex administered to the subject in need thereof comprises a first polypeptide comprising the amino acid sequence of SEQ ID NO: 63 and a second polypeptide comprising the amino acid sequence of SEQ ID NO: 49, wherein the first polypeptide and the second polypeptide are linked via disulfide bond.

[0254] In some embodiments, for treating botulism, the complex administered to the subject in need thereof comprises a first polypeptide comprising an amino acid sequence that is at least 80%, at least 81%, at least 82%, at least 83%, at least 84%, at least 85%, at least 86%, at least 87%, at least 88%, at least 89%, at least 90%, at least 91%, at least 92%, at least 93%, at least 94%, at least 95%, at least 96%, at least 97%, at least 98%, at least 99%, or at least 99.5% identical to the amino acid sequence of SEQ ID NO: 126 or SEQ ID NO: 127, and a second polypeptide comprising an amino acid sequence that is at least 80%, at least 81%, at least 82%, at least 83%, at least 84%, at least 85%, at least 86%, at least 87%, at least 88%, at least 89%, at least 90%, at least 91%, at least 92%, at least 93%, at least 94%, at least 95%, at least 96%, at least 97%, at least 98%, at least 99%, or at least 99.5% identical to the amino acid sequence of any one of SEQ ID NOs: 49-56, wherein the first polypeptide and the second polypeptide are linked via disulfide bond. In some embodiments, for treating botulism, the complex administered to the subject in need thereof comprises a first polypeptide comprising the amino acid sequence of SEQ ID NO: 126 and a second polypeptide comprising the amino acid sequence of any one of SEQ ID NOs: 49-56, wherein the first polypeptide and the second polypeptide are linked via disulfide bond. In some embodiments, for treating botulism, the complex administered to the subject in need thereof comprises a first polypeptide comprising the amino acid sequence of SEQ ID NO: 127 and a second polypeptide comprising the amino acid sequence of any one of SEQ ID NOs: 49-56, wherein the first polypeptide and the second polypeptide are linked via disulfide bond. In some embodiments, for treating botulism, the complex administered to the subject in need thereof comprises a first polypeptide comprising the amino acid sequence of SEQ ID NO: 126 and a second polypeptide comprising the amino acid sequence of SEQ ID NO: 49, wherein the first polypeptide and the second polypeptide are linked via disulfide bond.

[0255] In some embodiments, the BoNT-neutralizing antibody (e.g., an anti-BoNT/A VHH as described herein) neutralizes the BoNT that is causing the botulism (e.g., reduces the activity of the BoNT causing the botulism by at least 20%). In some embodiments, the BoNT-neutralizing antibody (e.g., an anti-BoNT/A VHH as described herein) reduces the activity of the BoNT causing the botulism by at least 20%, at least 30%, at least 40%, at least 50%, at least 60%, at least 70%, at least 80%, at least 90%, or 100%.

[0256] In some embodiments, the disease treated using the complex comprising the catalytically inactive BoNT associated with a therapeutic agent is a neurological condition, and the therapeutic agent is a therapeutic agent for neurological conditions. Exemplary neurological conditions include, without limitation, spasmodic dysphonia, spasmodic torticollis, laryngeal dystonia, oromandibular dysphonia, lingual dystonia, cervical dystonia, focal hand dystonia, blepharospasm, strabismus, hemifacial spasm, eyelid disorder, cerebral palsy, focal spasticity and other voice disorders, spasmodic colitis, neurogenic bladder, anismus, limb spasticity, tics, tremors, bruxism, anal fissure, achalasia, dysphagia and other muscle tone disorders and other disorders characterized by involuntary movements of muscle groups, lacrimation, hyperhydrosis, excessive salivation, excessive gastrointestinal secretions as well as other secretory disorders, pain from muscle spasms, headache pain.

[0257] In some embodiments, the condition is spinal muscular atrophy (SMA) and the therapeutic agent being delivered is functional SMN1 and/or SMN2 proteins, or small molecules and oligonucleotide that adjust expression of SMN1 and SMN2.

[0258] In some embodiments, the condition is Amyotrophic lateral sclerosis (ALS), and the therapeutic agent being delivered is antibodies or small molecules that target aggregated SOD1 proteins.

[0259] In some embodiments, the condition is an inherited form of motor neuron degeneration diseases and the agent being delivered is a gene editing agent for correcting genomic mutations in relevate genes (e.g., a Cas9 protein and a sgRNAs targeting the relevant genes, or zinc-finger nuclease for genetic editing).

[0260] Some of the embodiments, advantages, features, and uses of the technology disclosed herein will be more fully understood from the Examples below. The Examples are intended to illustrate some of the benefits of the present disclosure and to describe particular embodiments, but are not intended to exemplify the full scope of the disclosure and, accordingly, do not limit the scope of the disclosure.

### EXAMPLES

### Example 1. Delivery of Therapeutic Agents Using Catalytically Inactive Botulium Neurotoxins

[0261] Botulinum neurotoxins are a family of bacterial toxins, including seven major serotypes (BoNT/A-G)¹. These toxins target motor nerve terminals with extreme specificity and blocks neurotransmitter release from motor neurons, thus paralyzing animals and humans and resulting in a disease known as botulism. These toxins have been widely used for treating a variety of human diseases, and they are also classified as one of the six most dangerous potential bioterrorism agents.

[0262] The major issue with treating botulism is that some toxins have extremely long half-life in human neurons, for instance, maintaining its activity and blocking synaptic transmission for 6 months. This posts a formidable challenge for developing effective small molecular inhibitors. BoNTs can be neutralized by neutralizing antibodies. However, this only works for toxins that still have not entered motor neurons. There are currently no available toxin inhibitors that can block toxin activity inside neurons or shorten the duration of toxin half-life inside neurons.

[0263] If toxin neutralizing antibodies can be delivered into motor neurons, these antibodies can then bind to toxins and block toxin activity inside neurons. However, there are two major challenges: (1) be able to target motor neurons specifically; (2) be able to penetrate the cell membrane and deliver the antibody into the cytosol of the neuron. Ironically, these two challenges have been fully addressed by BoNTs themselves, as these toxins target motor neurons specifically and can deliver its functional domain, which is 50 kDa, across endosomal membranes into the cytosol of the cells. Therefore, BoNTs can be potentially utilized as an ideal delivery tool targeting motor neurons. Furthermore, such delivery tools would be useful for delivering a variety of cargoes/therapeutics into motor neurons for modulating motor neuron activities and for treating motor neuron related diseases including motor neuron degenerative diseases such as amyotrophic lateral sclerosis (ALS).

[0264] Such a BoNT-based delivery system have been previously developed in the laboratory and showed to be able to deliver proteins into neurons. Of course, to serve as a delivery tool, BoNTs must be “de-toxified” to fully get rid of its toxicity. BoNTs are composed of three functional domains: (1) the light chain (LC), which is a protease domain that is delivered into the cytosol of cells; (2) translocation domain (H_{N}), which helps the LC across the endosomal membrane in cells into the cytosol; (3) receptor-binding domain (Hc), which is responsible for targeting motor neurons⁴. Inactive form of toxin is usually generated by introducing point mutations into its LC to abolish its protease activity inside neurons. However, all currently reported “inactive” form of BoNTs still showed a low level of toxicity when injected into mice^{3,5}. The reason for this residual toxicity remains unknown, but it forms the major barrier for developing a useful delivery system.

[0265] Three new BoNT-like toxins, termed BoNT/X, BoNT/En and BoNT/PMP1^{6,7,63} were recently identified. These toxins share the same overall structure and function as other BoNTs, but they have significant divergence on sequences from BoNTs and form a separated branch from BoNTs. Their LCs and translocation domains display the same function as these domains in BoNTs, but their Hcs do not specifically target motor neurons in mice, thus BoNT/X, BoNT/En, and BoNT/PMP1 do not target mammalian motor neurons. Here it was examined whether a safe delivery tool can be developed based on creating novel chimeric proteins containing the LC and translocation domain of BoNT/X or BoNT/En and the receptor-binding domain of a BoNT, which confers specific binding to moto neurons. It was found that, in contrast to delivery tools based on traditional BoNTs (BoNT/A-G), these designed chimeric toxin (for instance: BoNT/XA (LC-Hn of BoNT/X fused with the Hc of BoNT/A)) showed no detectable toxicity in vivo in mouse models, thus representing a safe and effective delivery system for deliver cargo/therapeutics into motor neurons.

[0266] A VHH antibody⁸ fused with catalytically inactive BoNT (VHH-^{ci}BoNT) was generated (FIG. 1A). The Hc of a BoNT (from BoNT/A-H) can be utilized to replace the Hc of these inactive BoNT-like toxins in order to confer the specificity toward mammalian motor neurons. LCHn/X and Hc/A was used as an example. LCHn/X was fused to Hc/A (BoNT/XA) because Hc/X had shown no specific binding to mouse motor neurons. To abolish the catalytic activity, three amino acids at the active site were mutated (E228Q, R360A, Y363F for LC/X) using site-directed mutation. The VHHB8 clone, which binds to LC/A with high affinity (K_{D}=1.06 nM) and is able to neutralize LC/A as described in previous publication Tremblay J M et al., 2010, Toxicon, 56:990-998, was conjugated at the N-terminal of LC/X to be delivered into the neuron. It was first examined whether ^{ci}BoNT/XA can deliver the VHH antibody into neuronal cytosol and neutralize LC/A on the cultured neuron. Rat cultured cortical neurons were exposed to 20 pM BoNT/A. After 12 hours, the BoNT/A in the medium was washed out, and intoxicated neurons were further incubated with VHH-^{ci}BoNT/XA for up to 5 days (FIG. 2A). Cleavage SNAP-25 were detected via immunoblotting analysis. As shown in FIG. 2B, VHH-^{ci}BoNT/XA decrease the number of cleavage SNAP-25 at dose-dependent manner at day 1. VHH-^{ci}BoNT/XA almost completely blocked the cleavage of SNAP25 after 3 days, but not VHH-^{ci}BoNT/C. This indicates that ^{ci}BoNT/XA successfully delivers the VHHB8 antibody into neuronal cytosol and ^{ci}BoNT/XA showed a high level of efficacy in delivering VHHB8 than inactive ^{ci}BoNT/C.

[0267] Next, the toxicity levels of various constructs, including VHH fused with catalytically inactive BoNT/XA, XC (LC-Hn of BoNT/X fused with the Hc of BoNT/C) and XD (LC-Hn of BoNT/X fused with the Hc of BoNT/D) were evaluated, and compared with VHH fused with inactive BoNT/C (VHH-^{ci}BoNT/C) and BoNT/D (VHH-^{ci}BoNT/D), as well as isolated VHH and ^{ci}BoNT/C. As shown in Table 1, the indicated amount of proteins were injected into mice via IP injection and the health of each mouse was monitored for 5 days. VHH alone showed no toxicity at the dose tested (10 mg/kg). ^{ci}BoNT/C at 4 mg/kg), VHH-^{ci}BoNT/C at 0.8 mg/kg, and VHH-^{ci}BoNT/D at 0.2 mg/kg caused ‘botulism-like’ paralysis and these mice died within 10 h after injection. In contrast, VHH-^{ci}BoNT/XA, /XC, and/XD did not show any adverse effect at even 100 mg/kg.

[0268] These results further confirmed that delivery tools based on inactive traditional BoNTs have residue toxicity, while the novel delivery tool based on inactive chimeric toxin such as ^{ci}BoNT/XA showed no toxicity, thus it represents a feasible drug delivery tool targeting neurons.

[0269] Table 1 shows toxicity of VHH-fused catalytically inactive BoNT/XA, /XC, and /XD (VHH-^{d}BoNT/XA, /XC, and/XD) in vivo in mouse. The indicated dose of VHH-^{ci}BoNT/XA, /XC, /XD, /C, /D, VHH B8, and ^{ci}BoNT/C was administrated to mouse by IP injection. The mice were observed up to 5 days after injection. ^{ci}BoNT (4 mg/kg), VHH-^{ci}BoNT/C (0.8 mg/kg) and VHH-^{ci}BoNT/D (0.2 mg/kg) caused ‘botulism-like’ paralysis and these mice died within 10 h after injection, but no adverse effect was observed by VHH-^{ci}BoNT/XA, /XC, and/XD (100 mg/kg).

| | | Number | |
|---|---|---|---|
| | | survived/ | |
| | | Number | |
| | Dose | on the | Survival |
| Protein | [mg/kg] | study | (%) |
| VHH-^{ci}BoNT/X-A | 2 | 3/3 | 100 |
| | 6 | 6/6 | 100 |
| | 30 | 6/6 | 100 |
| | 60 | 6/6 | 100 |
| | 100 | 6/6 | 100 |
| VHH-^{ci}BoNT/X-C | 0.2 | 2/2 | 100 |
| | 2 | 6/6 | 100 |
| | 6 | 6/6 | 100 |
| | 100 | 6/6 | 100 |
| VHH-^{ci}BoNT/X-D | 100 | 4/4 | 100 |
| VHH B8 | 10 | 6/6 | 100 |
| ^{ci}BoNT/C | 2 | 8/12 | 67 |
| | 4 | 1/6 | 17 |
| | 10 | 0/3 | 0 |
| VHH-^{ci}BoNT/C | 0.2 | 6/6 | 100 |
| | 0.4 | 6/6 | 100 |
| | 0.8 | 1/6 | 17 |
| | 2 | 1/6 | 17 |
| Boiled VHHB8-^{ci}BoNT/C | 2 | 6/6 | 100 |
| VHH-^{ci}BoNT/D | 0.02 | 9/9 | 100 |
| | 0.2 | 4/13 | 31 |

[0270] The therapeutic potential of intramuscular administrated VHH-^{ci}BoNT/XA to mice that showed leg muscle paralysis by BoNT/A was next investigated. The neutralization activity of VHH-^{ci}BoNT/XA was evaluated using the Digit Abduction Score (DAS) assay, which is a well-established non-lethal assay. Mice were injected with 5.8 pg of BoNT/A in the right hind limb muscle. Muscle paralysis was assessed according to the DAS scale, as previously reported (FIG. 3A). After 18 hours, the BoNTA-injected mice showed score ‘2-3,’ indicating that BoNT/A entered into the neuron and cleaved the substrate. Then the indicated concentration of VHH-^{ci}BoNT/XA were injected into the same muscle (FIG. 3B). As shown FIG. 3C, VHH-^{ci}BoNT/XA-injected mice showed score ‘0’ after 3 days, while ^{ci}BoNT/XA that is not fused with VHHB8 antibody did not show any recovery. It was next examined how VHH-^{ci}BoNT/XA led to shortening the paralysis by BoNT/A. BoNT/A induced muscle paralysis was recovered after 35 days. In contrast, 9 ug of VHH-^{ci}BoNT/XA showed complete recovery from the paralysis within 3 days (FIG. 3D). 0.6 and 6 ug of VHH-^{ci}BoNT/XA also showed similar results. Finally, treatment with VHH-^{ci}BoNT/XA 3-days and 6-days after exposure to BoNT/A was tested. As shown in FIG. 3E, injection of VHH-^{ci}BoNT/XA was able to quickly restore the muscle contraction ability and reduce the DAS score to 0 within 15 hours at both 3-days and 6-days post-exposure to BoNT/A. Together, these results demonstrate that the ^{ci}BoNT/XA can deliver the VHH into neuronal cytosol and neutralize BoNT/A.

[0271] The therapeutic potential of VHH-^{ci}BoNT/XA was further examined using intraperitoneal (IP) injection. For this test, the mouse was administrated BoNT/A in the hind limb muscle first. VHH-^{ci}BoNT/XA was administrated by IP injection 18 hours later. 6 ug of VHH-^{ci}BoNT/XA and VHH-^{ci}BoNT/C were slightly effective, but did not shorten the duration of paralysis (FIGS. 4A-4B). The dose of VHH-^{ci}BoNT/XA was further increased to 60 and 600 ug. High-doses of VHH-^{ci}BoNT/C were not tested due to the toxicity issue (Table 1). Increasing the dose of VHH-^{ci}BoNT/XA showed better neutralization (FIG. 4A). The effect of multiple injections of VHH-BoNT/XA was tested next (FIGS. 4C-4D). Two consecutive injection of VHH-BoNT/XA (6 μg) showed a similar result of a single injection of 600 ug. Injection of VHH-BoNT/XA (6 μg) once per day for 6 days resulted in complete recovery within 6 days.

[0272] Next, whether VHHB8-^{ci}BoNT/XA can neutralize BoNT/A was analyzed in a systematic lethality assay. Briefly, 20 pg of BoNT/A (˜4 LD50 value) were injected into mouse via IP injection. 10 hours later, the mice that showed typical systematic botulism phenotype were randomly separated into four groups and subjected to IP injection of the indicated proteins: group 1; vehicle, 0.2% gelatin-saline, group 2; VHH and ^{ci}BoNT/XA mixture, group 3; 6 ug of VHH-^{ci}BoNT/XA, group 4; 0.6 ug of VHH-^{ci}BoNT/XA. Mice were further observed for 5 more days (FIG. 5A). While 100% of mice in the group 1 and group 2 died, 90% of mice in the group 3 survived and showed a complete restoration of their activity (FIG. 5B). Group 4, which was injected with 10-fold less VHH-^{ci}BoNT/XA compared to the group 3, showed ˜40% survival rate (FIG. 5B). These results demonstrate that VHH-^{ci}BoNT/XA can be utilized to treat systematic botulism.

[0273] Next, whether multiple VHHs can be tethered and delivered together into neurons were examined. A VHH known as B10 that binds to LC of BoNT/B (LC/B) and neutralizes LC/B activity⁸ was chosen. A new construct that contains both VHHB8 (targeting LC/A) and VHH-B10 (targeting LC/B) was fused to ^{ci}BoNT/XA (FIG. 6A). BoNT/A (5.8 pg) or BoNT/B (3.5 pg) were injected in hind limb muscles in different mice. After 18 hours, 6 μg of VHH B8-B10-^{ci}BoNT/XA were injected in the same muscle and DAS score were recorded. As shown in FIG. 6B, VHH-B8-B10-^{ci}BoNT/XA treatment shortened the duration of muscle paralysis induced by BoNT/A (left panel) and BoNT/B (right panel). The DAS scores over time further demonstrate that VHH B8-B10-^{ci}BoNT/XA was effective in shortening the duration of paralysis induced by BoNT/A (left panel) and BoNT/B (right panel). These data demonstrate that multiple VHHs can be successfully delivered into the cytosol of neurons using ^{ci}BoNT/XA-based delivery tool. VHH B8-B10-^{ci}BoNT/XA also represent a single unique therapeutic agent that can be utilized to treat botulism caused by two different toxins (BoNT/A and BoNT/B, which are responsible for majority of human botulism cases). Such a multi-target agent will provide significant reduction in drug development cost, and can be utilize to treat patients prior to knowing the serotype of the toxins, which could take a few days to determine.

[0274] Herein it is demonstrated that catalytically inactive BoNT/XA (^{ci}BoNT/XA) protein can deliver the VHH antibody into motor neuron with high efficiency. Furthermore, VHH-^{ci}BoNT/XA, XC, and XD does not have toxicity against mouse model thus ^{ci}BoNT/XA, XC, and XD representing a new generation of delivery tools that is effective and safe for targeting neurons. The results also established a novel way to treat botulism in a post-exposure manner, by delivering VHHs into the cytosol of neurons and neutralizing LC of BoNTs inside neurons.

### Materials and Methods

[0275] Antibodies: The following antibodies were purchased from indicated vendors: mouse monoclonal anti-SNAP-25 (71.1, Synaptic Systems), mouse monoclonal Anti-β-Actin (Sigma).

[0276] Protein expression and purification: VHH-^{ci}BoNT/XA, ^{ci}BoNT/XA, VHH-^{ci}BoNT/C and ^{ci}BoNT/C were expressed as His6 tagged recombinant proteins in E. coli BL21 (DE3) cells using autoinduction medium. Expression was allowed to proceed incubated at 16-18° C. overnight with vicious shaking. Cell pellets were resuspended in binding buffer for Ni-affinity [20 mM Tris-HCl pH7.5, 500 mM NaCl, 20 mM Imidazole, 10% glycerol with 0.1 mM of PMSF. Cells were disrupted by sonication on ice. Lysates were clarified by centrifugation at 20,000 rpm for 30 min at 4° C. The proteins were purified via HisTrap HP (GE Healthcare). Purified proteins were treated with thrombin (2 U/mg of protein) at 4° C. overnight. The activated proteins were further purified by Superdex 200 pg 16/600 gel-filtration column (GE Healthcare). To remove LPS, proteins were passed through the Pierce™ High Capacity Endotoxin Removal Resin column (ThermoFisher Scientific). Proteins were sterile by 0.22 um filter and store at −80° C.

[0277] Neuron culture and toxin neutralization assay: Rat cortical neurons were prepared from E19 embryos as described previously⁹. Neurons were exposed to 20 pM of BoNT/A in 300 uL medium for 12 h. The cells were washed by cultured medium three times and further incubated with 10 and 50 nM of VHH-^{ci}BoNT/XA up to 5 days. Immunoblot analysis was carried out to detect SNAP-25. Actin was used as a loading control.

[0278] Digit abduction score (DAS) assay and administration of VHH-^{ci}BoNT/XA; mice were injected in the left hind limb muscle with 5.8 pg of BoNT/A (META biology, Inc.) diluted in saline with 0.2% gelatin. After 18 hours, the score reached “2-3” and VHH-^{ci}BoNT/XA was administrated by IM injection at the same muscle or by IP injection. Muscle paralysis was assessed one time per one to two days according to the DAS assay scale.

### Example 2 Targeted Intracellular Delivery of Nanobodies Inhibits Botulinum Neurotoxins in Neurons and Achieves Effective Treatment of Botulism

[0279] BoNTs are a family of bacterial toxins with seven major serotypes (BoNT/A-G)¹⁰⁻¹⁵. They are the most potent toxins known and classified in the United States as one of the six most dangerous potential bioterrorism agents (Category A and Tier 1)¹⁶. These toxins target and enter motor neurons and block neurotransmitter release, causing the disease known as botulism, whose defining symptom is flaccid paralysis (losing the ability to contract muscles). Among the seven serotypes, BoNT/A, B, and E (and rarely F) are associated with human botulism, with BoNT/A and B responsible for most cases. Although rare, botulism cases persist in human populations with a death rate of ˜3-5%^{17,18}

[0280] A major challenge for addressing the threats posed by BoNT/A and B is their extraordinary long half-life within the cytosol of neurons¹⁹⁻²³, leading to persistent nerve blockade and muscle paralysis that lasts for months in humans. Patients must rely on intensive care and mechanical ventilation for weeks to months to stay alive, which renders the treatment expensive and could easily overwhelm the health care system during a large-scale outbreak¹⁶. BoNT-neutralizing antibodies have been developed²⁴⁻²⁷, but they are useful only before toxins enter neurons, and there are no inhibitors available that can block toxin action within neurons.

[0281] BoNT/A and B are also the two serotypes approved for treating a multitude of medical conditions as well as for reducing wrinkles, benefiting millions of people every year^{10,11,28} BoNT/A is the dominant form in clinical use. Local injection of tiny amounts of BoNT/A provides persistent muscle relaxation that lasts 4-6 months. However, if the patient is dissatisfied with the effect or there is unwanted diffusion of BoNT/A, there are no available post-exposure remedies that can reverse paralysis.

[0282] BoNTs are composed of two chains and three functional domains¹⁰⁻¹⁵: a light chain (LC, 50 kDa) which is a protease domain; and a heavy chain (HC) that can be further divided into a membrane translocation domain (H_{N}, ˜50 kDa) and a receptor-binding domain (H_{C}, ˜50 kDa). BoNTs are initially synthesized as a single polypeptide. The linker region between LC and HC needs to be proteolytically cleaved in order to generate the active di-chain form, in which the LC remains covalently connected to the HC via an inter-chain disulfide bond. These toxins target motor neurons with extraordinary specificity by binding to neuronal receptors through the Hc and enter neurons via receptor-mediated endocytosis. A drop in pH within endosomes then triggers conformational changes in the HN, leading to translocation of the LC across endosomal membranes into the cytosol. The inter-chain disulfide bond is reduced once the LC reaches the cytosol, thus releasing the LC. The LC then cleaves a specific set of neuronal proteins belonging to the SNARE protein family, including SNAP-25 (cleaved by BoNT/A, E, and C), Syntaxin 1 (cleaved by BoNT/C), and three homologous vesicle membrane proteins VAMP1, 2, and 3 (targets for BoNT/B, D, F, and G). Syntaxin 1 and SNAP-25 are localized on plasma membranes and form a complex with VAMPs, known as the SNARE complex, which is the core machinery mediating fusion of synaptic vesicle membranes to the plasma membranes^{29,30}. Cleavage of any one of these three SNARE proteins disrupts vesicle membrane fusion to plasma membranes, thus blocking the release of neurotransmitters.

[0283] It has been shown that the LC of BoNT/A (LC/A) maintains its activity within neurons for months, which is the reason for its ability to induce persistent paralysis that lasts 4-6 months in humans¹⁹⁻²³. Intoxicated neurons fully recover their function once the toxin LC loses its activity. Thus, successful treatment of botulism requires targeting and inhibiting LCs within neurons. However, it has been challenging to develop small-molecular inhibitors that work effectively in neurons. Many neutralizing antibodies against LCs have been developed, but they cannot target motor neurons and penetrate the cell membrane into the cytosol of neurons.

[0284] As BoNTs are naturally capable of targeting motor neurons and delivering their LCs into neurons, they were explored as a carrier for targeted delivery of protein cargoes in 2004 by Bade et al³¹. They fused different proteins to the N-terminus of full-length active form of BoNT/D and tested these fusion proteins on cultured neurons, utilizing cleavage of VAMP2 by BoNT/D-LC (LC/D) in neurons as a sensitive readout for successful translocation of the cargo into the cytosol. They found that fusion of a dihydrofolate reductase (DHFR) or a LC/A did not affect overall translocation efficacy, while fusion of firefly luciferase or green fluorescent protein (GFP) reduced translocation efficacy. These studies demonstrate that a protein cargo can be delivered into the cytosol of neurons through direct fusion to a BoNT, and the translocation efficacy varies depending on cargo proteins.

[0285] Before use as a delivery tool, BoNTs must be “de-toxified”, which turns out to be challenging. Simply deleting the LC often creates solubility issues due to disrupting native interactions between LC and H_{N}³²⁻³⁴. An alternative approach is to abolish LC protease activity by mutating key residues. LCs are zinc-dependent proteases with a conserved HEXXH motif¹⁹⁻³⁵. Mutations are usually introduced to one or two residues in this motif plus two residues (e.g. R363A and Y366F in BoNT/A) that are conserved in all BoNTs and critical for their protease activity³⁶. Such catalytically inactive forms of BoNT/A and BoNT/C containing three designed point mutations have been developed and shown to have no protease activity. However, both still induced flaccid paralysis and death at μg-per-mouse levels³⁷⁻³⁸. This residual toxicity has been independently reported for inactive full-length BoNT/A, B, C, E, and F containing three point-mutations in their LCs³⁹. The source of this residual toxicity remains unknown, but it could be due to the translocation process, which may disrupt endosomes at μg-per-mouse levels. Although this toxicity is much lower compared with active toxins (μg versus pg per mouse), it nevertheless is a safety concern and a major barrier to the development of inactive BoNTs as delivery tools.

[0286] A BoNT-like toxin was recently identified, termed BoNT/X⁴⁰, which has the same conserved domain structure as other BoNTs, with certain distinct features. For instance, the LC of BoNT/X (LC/X) cleaves not only the canonical substrates VAMP1/2/3, but also additional VAMP family members VAMP4, VAMPS, and Ykt6⁴⁰. Furthermore, the Hc of BoNT/X (H_{C}/X) does not target motor neurons in mice; the host species targeted by BoNT/X remains to be established. Interestingly, the fragment containing the LC-H_{N} portion of BoNT/X (LCH_{N}/X) can translocate its LC more efficiently into neurons than the corresponding fragments of BoNT/A and BoNT/B⁴⁰. Utilizing the LCH_{N}/X, a chimeric inactive toxin-based neuron-specific drug-delivery platform was developed by de-activating its protease activity through mutations and by fusing it to the H_{C} of a BoNT. Therapeutic proteins targeting BoNT-LCs were then created by fusion of the chimeric inactive toxin platform with nanobodies (also known as VHH antibody), which are 12-15 kDa proteins derived from the single variable domain of the heavy-chain-only antibodies in Camelidae such as alpacas and llamas. Such therapeutic proteins showed no toxicity even at 100 mg/Kg dose in vivo in mice and successfully neutralized BoNT-LC activity in neurons, shorten the duration of muscle paralysis, and rescue mice from lethal dose of BoNT/A and BoNT/B after the onset of botulism.

### Results

### Chimeric Inactive Toxin-Based Delivery Platform Shows No Toxicity In Vivo

[0287] To explore whether LCH_{N}/X might provide a safer delivery tool than inactive BoNTs, three chimeric inactive toxins were created by: (1) fusing LCH_{N}/X with the Hc of BoNT/A (H_{C}/A), BoNT/C (H_{C}/C), or BoNT/D (H_{C}/D). These H_{C}s essentially replace Hc/X and confer specificity toward mammalian motor neurons (FIGS. 7A and 7B, and FIG. 11A); (2) introducing three point-mutations (E228Q/R360A/Y363F) to key residues in LC/X to abolish its protease activity (designated catalytic inactive form, ^{ci}LCH_{N}); and (3) modifying the linker region between the LC and H_{N} to include a thrombin cleavage site, which enables us to specifically convert the chimeric toxin from a single chain into a di-chain form using thrombin. In addition, a thrombin cleavage site is also introduced before the C-terminal His6 tag to cleave off the His6 tag after protein purification.

[0288] These chimeric inactive toxins are termed ^{ci}BoNT/XA, ^{ci}BoNT/XC, and ^{ci}BoNT/XD. A previously reported nanobody was then selected (known as VHH-ALc-B8, abbreviated “A8” here), which was raised against recombinantly purified LC/A in alpaca and has been demonstrated to inhibit LC/A in vitro and in cells^{41,42}. A8 served as a cargo and was fused directly to the N-terminus of chimeric inactive toxins, generating A8-^{ci}BoNT/XA (FIGS. 7A and 7B), A8-^{ci}BoNT/XC, and A8-^{ci}BoNT/XD (FIG. 11A). For comparison, a catalytically inactive form of BoNT/C (^{ci}BoNT/C) was also constructed, containing the same set of three-point mutations in its LC as in ^{ci}LC/X, as well as A8-^{ci}BoNT/C fusion protein (FIG. 12).

[0289] These fusion proteins were expressed and purified in E. coli, and readily converted into a di-chain form by thrombin treatment (FIGS. 11B and 12B). The inter-chain disulfide bond is formed as the reducing agent DTT treatment separates these proteins into two parts: one is ^{ci}LC (˜50 kDa) or A8-^{ci}LC (˜65 kDa), and the other is H_{N}-H_{C} (˜100 kDa, FIGS. 11B and 12B). A8-^{ci}LC showed the same level of potency as A8 alone in inhibiting LC/A activity in vitro (FIG. 11C).

[0290] It was first examined whether these fusion proteins have any toxicity in vivo in mice. Intraperitoneal (IP) injection of A8-^{ci}BoNT/C caused death of most mice at 0.8 mg/Kg range (FIG. 17). Injection of A8 alone or boiled A8-^{ci}BoNT/C showed no toxicity, while ^{ci}BoNT/C alone induced death in the 2 mg/Kg (FIG. 17). These findings are consistent with previous reports that BoNTs with inactive LCs still show residual toxicity^{37,39}. In contrast, IP injection of A8-^{ci}BoNT/XA, A8-^{ci}BoNT/XC, or A8-^{ci}BoNT/XD all showed no detectable toxicity, even at 100 mg/Kg (FIG. 17).

A8-LC/X is Delivered into the Cytosol of Cultured Neurons

[0291] It was then analyzed whether the chimeric inactive toxin platform can deliver the A8-^{ci}LC/X fragment into the cytosol of cultured neurons. The experimental design took advantage of the fact that A8-^{ci}LC/X is connected via a disulfide bond to the H_{N}-H_{C}. Acidification of endosomes induces translocation, which would deliver the A8-^{ci}LC/X across the endosomal membrane into the cytosol (FIG. 7B). Once reaching the cytosol side, the disulfide bond is reduced, which has been shown to be assisted by the thioredoxin reductase-thioredoxin protein disulfide-reducing system⁴³, and A8-^{ci}LC/X is separated from the H_{N}-H_{C} (FIG. 7B). If the translocation is not successful, A8-^{ci}LC/X would still be connected with the H_{N}-H_{C}. Thus, the appearance of isolated A8-^{ci}LC/X in neuron lysates when samples were analyzed under non-reducing conditions indicates that translocation was successful.

[0292] Cultured rat cortical neurons were exposed to A8-^{ci}BoNT/XA at 30 and 300 nM concentrations for 12 h. Neuron lysates were harvested and subjected to immunoblot analysis under non-reducing conditions. A8 could be detected using an antibody against the constant region of nanobodies. The isolated A8-^{ci}LC/X band was detected in neuron lysates (FIG. 7C). To further demonstrate that the A8-^{ci}LC/X bands were generated by translocation, the same experiment was carried out in the presence of bafilomycin, a small molecule inhibitor that blocks acidification of endosomes. This treatment did not affect the overall binding of A8-^{ci}BoNT/XA to neurons, as the full-length band at 165 kDa showed intensity similar to that of neurons not treated with bafilomycin, yet bafilomycin treatment greatly reduced the isolated A8-^{ci}LC/X band (FIG. 7C). Together, these experiments demonstrate that A8-^{ci}LC/X has been delivered into the cytosol of neurons.

### Delivered A8 and LC/X are Functional in the Cytosol of Neurons

[0293] To further estimate the translocation efficacy and determine whether translocated proteins are functional in cells, a new construct was built that expresses A8 fused with the active LCH_{N}/X containing no mutations in its LC. There is an additional short sortase recognition tag (residues LPETGG) added to the C-terminus. This tag can be recognized by the bacterial transpeptidase sortase, which can ligate the fusion protein covalently to the N-terminus of a second protein containing a free glycine on the N-terminus (FIG. 13A)⁴⁰⁻⁴⁴. A8-LCH_{N}/X was ligated with the H_{C}/A, yielding an A8 fused with an active full-length BoNT/XA (termed A8-BoNT/XA, FIGS. 13A and 13B). As a control, the active BoNT/XA was also generated by ligating LCH_{N}/X and H_{C}/A (FIG. 13B). This approach allows us to produce limited amounts of active toxin without creating the coding sequence for full-length toxins to ensure biosafety. A8-BoNT/XA allows us to examine whether the translocated A8-LC/X is functional in cultured neurons by analyzing cleavage of VAMP2. As shown in FIG. 7D, incubation of cultured neurons with picomolar levels of A8-BoNT/XA or BoNT/XA both resulted in cleavage of VAMP2, demonstrating that the A8-LC are functional after translocation. Compared with BoNT/XA, A8-BoNT/XA showed 7.4-fold reduction in efficacy based on assessing VAMP2 cleavage in neurons (FIG. 7D). A8-LCH_{N}/X and LCH_{N}/X showed similar activity in cleaving recombinant VAMP2 protein in vitro, indicating that fusion with A8 does not affect LC activity (FIG. 13C). Together, these data suggest that A8-LC/X was delivered into neurons at ˜7.4-fold lower efficacy compared with LC/X.

[0294] It was then evaluated whether the delivered A8-^{ci}LC/X can neutralize LC/A within cultured neurons. Neurons were first exposed to BoNT/A for 12 h, washed, further incubated in toxin-free medium for another 24 h, followed by incubation with A8-^{ci}BoNT/XA for 48 h (FIG. 7E). Incubation with a mixture of separated A8 and ^{ci}BoNT/XA proteins was analyzed in parallel as a control. Cell lysates were harvested and analyzed by immunoblot, revealing persistent cleavage of SNAP-25 by LC/A^{45,46}. Incubation with separated A8 and ^{ci}BoNT/XA did not affect cleavage of SNAP-25, whereas incubation with A8-^{ci}BoNT/XA reduced SNAP-25 cleavage in neurons (FIG. 7E). Similarly, incubation with A8-^{ci}BoNT/XC or A8-^{ci}BoNT/XD also reduced SNAP-25 cleavage in neurons in this post-exposure model (FIG. 11D). These data demonstrate that ^{ci}BoNT/XA, XC, and XD were able to deliver a functional A8 into the cytosol of neurons.

[0295] The receptor-binding property of A8-^{ci}BoNT/XA was also validated and it was confirmed that its binding to neurons was reduced by a recombinant protein containing the 4th luminal domain fragment of SV2C, which is a protein receptor for BoNT/A (FIG. 14A)^{47,48}. Consistently, pre-mixing nanomolar A8-^{ci}BoNT/XA with picomolar BoNT/A and adding them together to cultured neurons reduced cleavage of SNAP-25 compared with BoNT/A alone, further suggesting that A8-^{ci}BoNT/XA utilizes the same receptors as BoNT/A and thus reduced binding and entry of BoNT/A into neurons (FIG. 14B). SV2 are a family of synaptic vesicle membrane proteins including SV2A, B, and C, and their exposure to the cell surface is reduced after synaptic vesicle exocytosis is blocked by BoNTs. However, SV2 still travels to cell surfaces during its nascent biogenesis before it is internalized and sorted into synaptic vesicles, and this constitutional secretory pathway is not affected by any BoNTs^{49,50}, which likely provides an entry pathway for A8-^{ci}BoNT/XA after synaptic vesicle exocytosis is blocked by pre-loaded BoNT/A.

### Intramuscular Injection of A8-^{ci}BoNT/XA Shortens BoNT/A-Induced Leg Muscle Paralysis

[0296] After validating these fusion proteins in cultured neurons, assessing their effectiveness in treating BoNT/A intoxication in vivo was then focused on. A local paralysis model known as the Digit Abduction Score (DAS) assay⁵¹ was first utilized. Sub-lethal doses of BoNT/A are injected intramuscularly (IM) into the hind legs of mice, which paralyzes the leg muscle and prevents toe spreading during the startle response. The degree of toe spreading is scored 0-4, reflecting the degree of muscle paralysis (FIG. 8A). Injection of BoNT/A at 6 pg induced the severest scores of 3-4. In mice, possibly due to their fast metabolism rates, BoNT/A induces paralysis that lasts ˜30-40 days (FIG. 8B). To develop a post-exposure model, BoNT/A was first injected to mice, and after a 18 h period, the leg is obviously paralyzed with scores 2-3. IM injection of A8-^{ci}BoNT/XA were then carried out to the same BoNT/A injection site (FIG. 8B). Separated A8 and ^{ci}BoNT/XA proteins were analyzed in parallel as controls: neither affected the degree or duration of muscle paralysis (FIG. 8B, right-lower panel). In contrast, injecting as little as 60 ng of A8-^{ci}BoNT/XA drastically reduced muscle paralysis (FIG. 8B). Injecting 600 ng A8-^{ci}BoNT/XA fully restored muscle function (reaching a score of 0) within three days, and increasing the dose to 6 μg yielded similar results (FIG. 8B). The effect is specific for BoNT/A, as A8-^{ci}BoNT/XA did not alter the degree and duration of paralysis induced by BoNT/B in DAS assays (FIGS. 15A and 15B). Furthermore, A8-^{ci}BoNT/XC and A8-^{ci}BoNT/XD reduced the degree or duration of BoNT/A-induced leg muscle paralysis, albeit requiring higher doses than A8-^{ci}BoNT/XA, suggesting that A8-^{ci}BoNT/XA is the most effective one in vivo (FIGS. 11D and 11E). A8-^{ci}BoNT/XA was thus focused on as a prototype.

[0297] To further confirm that A8-^{ci}BoNT/XA shortens muscle paralysis after toxin entry into motor neurons, A8-^{ci}BoNT/XA was injected on day 3 or day 6 after the initial BoNT/A injection, by which time paralysis is already decreasing (FIG. 8C, day 3 in red, day 6 in the triangle). Injecting 600 ng A8-^{ci}BoNT/XA to the same site where BoNT/A was injected restored muscle function within one day for both 3-days and 6-days post-injection of BoNT/A (FIG. 8C). More frequent monitoring of the degree of muscle paralysis revealed that the DAS score showed obvious decrease 6 h after injection of A8-^{ci}BoNT/XA, and muscle function was completely recovered by 15 h (FIG. 8D). Recovery of similar speed was achieved with 60 ng A8-^{ci}BoNT/XA (FIG. 8D), while the control mixture of separated V8 and ^{ci}BoNT/XA proteins showed no effect on the degree or duration of muscle paralysis (FIG. 15C).

### IP Injection of A8-^{ci}BoNT/XA Shortens BoNT/A-Induced Leg Muscle Paralysis

[0298] It was then analyzed whether A8-^{ci}BoNT/XA can effectively reach the paralyzed leg muscle through systemic circulation in vivo. BoNT/A (6 pg) was first injected to the hind leg muscle and waited 18 h for the muscle to be paralyzed. A8-^{ci}BoNT/XA was then injected via IP and the DAS scores were monitored (FIG. 8E). Injecting A8-^{ci}BoNT/XA reduced the local leg muscle paralysis and DAS scores, although a much higher dose (e.g. 600 μg) of A8-^{ci}BoNT/XA is required compared with the previous IM injection of A8-^{ci}BoNT/XA to the same BoNT/A injection site.

[0299] Interestingly, the effective dose can be lowered with multiple administrations of A8-^{ci}BoNT/XA. For instance, IP injection of 6 μg of A8-^{ci}BoNT/XA daily for two days elicited a recovery rate similar to a single dose of 600 μg, while dosing with 6 μg daily for seven days achieved an even faster recovery rate (FIG. 8F). As controls, injecting a total of 600 μg separated A8 and ^{ci}BoNT/XA, or 7 days of daily injections of A8 and ^{ci}BoNT/XA, did not affect the degree or duration of muscle paralysis (FIGS. 15D and 15E).

IP Injection of A8-^{ci}BoNT/XA Rescues Mice from Systemic BoNT/A Intoxication

[0300] It was then examined whether A8-^{ci}BoNT/XA provides effective post-exposure treatment of systemic BoNT/A intoxication and rescues mice from botulism. IP injection of 19.5 pg BoNT/A induced typical systemic botulism symptoms of a “wasp” body shape and reduced mobility within 9 h in mice, and all mice further developed immobility and severe respiratory stress that required euthanization within a few hours. To quantify the disease progress, a scoring system was developed based on the appearance of the wasp shape, the degree of mobility/activity, respiratory distress, and body weight changes (FIG. 18). Mice were first injected with BoNT/A (19.5 pg, IP), and IP injection of A8-^{ci}BoNT/XA was then carried out 9 h later in animals that developed obvious botulism symptoms (FIG. 9A). Injecting 0.6 μg/mouse of A8-^{ci}BoNT/XA reduced the rate of increase in the clinical score, but these mice eventually developed severe symptoms and lost 20% body weight within 48 h; all were euthanized (FIGS. 9B to 9D). A8-^{ci}BoNT/XA at 6 μg/mouse reduced clinical scores within 8 h, but one mouse (of 10) relapsed by 36 h and was euthanized. Further increasing A8-^{ci}BoNT/XA to 30 μg/mouse reduced clinical score and restored mobility/activity within 6 h. Body weight gains were comparable with those in control mice and no mice relapsed, suggesting full and complete recovery (FIGS. 9B to 9D). As controls, mixtures of A8 and ^{ci}BoNT/XA proteins did not offer any protection in this post-exposure model (FIGS. 9B to 9D).

Simultaneous Delivery of Two Nanobodies into Neurons

[0301] The studies expanded to target BoNT/B and evaluated whether multiple nanobodies can be delivered simultaneously by ^{ci}BoNT/XA. A nanobody raised against LC/B in alpaca (known as VHH-BL_{C}-JNE-B10, here abbreviated J10) was selected, which inhibits cleavage of VAMP2 by LC/B in vitro (FIGS. 16A and 16B). A8 and J10 were fused in tandem to the N-terminus of ^{ci}BoNT/XA and the fusion protein was expressed and purified in E. coli (FIG. 10A and FIG. 16A, termed A8-J10-^{ci}BoNT/XA). A8-J10-^{ci}BoNT/XA can be activated by thrombin and separated into two fragments, A8-J10-^{ci}LC/X and H_{N}—H_{C}, in the presence of DTT (FIG. 16A). Separated A8-J10-^{ci}LC/X was able to inhibit cleavage of VAMP2 by LC/B and cleavage of SNAP-25 by LC/A in the rat brain lysates with a potency similar to A8-J10 (FIGS. 16B and 16C). These results confirmed that A8 and J10 maintained their ability to inhibit LC/A and LC/B, respectively, within the A8-J10-^{ci}LC/X fusion protein.

[0302] The translocation efficacy of two nanobodies (A8-J10) was then compared with a single nanobody (A8). A new construct expressing A8-J10 fused with the active form of LCH_{N}/X was generated (A8-J10-LCH_{N}/X). LC/X within this A8-J10-LCH_{N}/X cleaved VAMP2 with efficacy similar to isolated LC/X in vitro, indicating that fusion with A8-J10 does not affect the activity of LC/X (FIG. 13C). A8-J10-LCH_{N}/X was then ligated with Hc/A using sortase to generate the active form A8-J10-BoNT/XA (FIG. 13D). Translocation efficacy was compared by examining cleavage of VAMP2 in cultured neurons exposed to ligated active toxins. Exposure to picomolar levels of A8-J10-BoNT/XA resulted in cleavage of VAMP2, and the degree of cleavage was similar to that of neurons exposed to the same concentrations of A8-BoNT/XA (FIG. 16D), suggesting that LC/X fused with two nanobodies was delivered into the cytosol of neurons as efficiently as the one fused with a single nanobody.

[0303] The ability of A8-J10-^{ci}BoNT/XA to inhibit LC/A within neurons was further assessed. Neurons were exposed to BoNT/A for 12 h, washed, incubated for another 24 h, and then incubated with V8-J10-^{ci}BoNT/XA for 48 h. A8-^{ci}BoNT/XA and a mixture of separated A8-J10 and ^{ci}BoNT/XA were analyzed in parallel as controls. Cell lysates were analyzed by immunoblot, detecting cleavage of SNAP-25 by LC/A. Incubation with A8-J10-^{ci}BoNT/XA reduced cleavage of SNAP-25, while the control mixture of A8-J10 and ^{ci}BoNT/XA did not affect cleavage of SNAP-25 (FIG. 16E). Incubation with A8-^{ci}BoNT/XA resulted in a larger reduction in cleavage of SNAP-25 compared with the same concentrations of A8-J10-^{ci}BoNT/XA (FIG. 16E), suggesting that A8-J10-^{ci}BoNT/XA showed overall lower efficacy in inhibiting LC/A in the cytosol of neurons compared with A8-^{ci}BoNT/XA.

### A8-J10-^{ci}BoNT/XA can Treat Both BoNT/A and BoNT/B Intoxication In Vivo

[0304] A8-J10-^{ci}BoNT/XA was then tested in vivo in mice. Like A8-^{ci}BoNT/XA, A8-J10-^{ci}BoNT/XA showed no toxicity after IP injection at 100 mg/Kg (FIG. 17). DAS assays were first carried out with injection of BoNT/A (FIG. 10B) or BoNT/B (FIG. 10C, BoNT/B-induced paralysis lasts ˜10-14 days in mice) to the hind leg. IM injection of A8-J10-^{ci}BoNT/XA to the same site 18 h later reduced DAS scores and shortened the duration of paralysis in a concentration-dependent manner for mice injected with either BoNT/A or BoNT/B. Muscle function was completely restored within 3 days for BoNT/A and within 2 days for BoNT/B after injection of A8-J10-^{ci}BoNT/XA, while the control mixture of A8-J10 and ^{ci}BoNT/XA did not affect the degree or duration of paralysis (FIGS. 10B and 10C). Notably, A8-J10-^{ci}BoNT/XA appeared to be less potent than A8-^{ci}BoNT/XA, as 6.5 μg is required to reduce DAS score to a similar degree as 60 ng of A8-^{ci}BoNT/XA (FIG. 8B and FIG. 10B). Further optimization of the A8-J10-^{ci}BoNT/XA protein might be needed to enhance its efficacy in neurons and in vivo.

[0305] The capability of A8-J10-^{ci}BoNT/XA was next examined to rescue mice from systemic toxicity of BoNT/A and BoNT/B, using the post-exposure IP injection model described in FIG. 9. IP administration of A8-J10-^{ci}BoNT/XA at 32.5 μg/mouse, 9 h after pre-injection of lethal doses of BoNT/A, rescued mice from death (FIG. 10D), reduced clinical scores (FIG. 10E), and eliminated body weight reduction (FIG. 10F). Lower concentrations (6.5 μg/mouse) elicited partial effects, while the control mixture of A8-J10 and ^{ci}BoNT/XA showed no effect (FIGS. 10D to 10F). Similar experiments were carried out with a lethal dose of BoNT/B (10 pg). Injection of A8-J10-^{ci}BoNT/XA showed concentration-dependent rescue from death (FIG. 10G), reduction in botulism phenotypes (FIG. 10H), and elimination of body weight reduction (FIG. 10I), with complete rescue achieved at 65 μg/mouse, while the control mixture of A8-J10 and ^{ci}BoNT/XA showed no effect (FIGS. 10G to 10I).

### Discussion

[0306] Development of biological drugs (biologics) such as proteins and antibodies has revolutionized many therapeutic areas. However, current generations of biologics are largely limited to acting on cell-surface targets. Intracellular proteins and processes represent vast untapped drug targets, yet the cell membrane forms a formidable barrier to both biologics and membrane impermeable small-molecule drugs. In addition, the capability to target a specific cell type is another major challenge for enhancing therapeutic efficacy and minimizing side effects. A protein-based drug delivery platform was developed that achieves both highly specific targeting of neurons and successful delivery of therapeutics into the cytosol of cells.

[0307] The effectiveness of this platform has been fully validated using BoNT intoxication models in vivo in mice. An anti-BoNT/A therapeutic protein was created by fusing a nanobody (A8) against LC/A to the N-terminus of the delivery protein. Using cultured neurons, it was demonstrated that A8 was delivered into the cytosol of neurons and neutralized LC/A. IM injection of this therapeutic protein 3-days or 6-days after the initial injection of BoNT/A restored muscle activity within 15 h in a local leg muscle paralysis model in mice. IP administration of this therapeutic protein rescued mice completely from systemic toxicity of BoNT/A after botulism symptoms developed. A second therapeutic protein was further developed containing two different nanobodies, one against LC/A and the other against LC/B. This single agent neutralized BoNT/A and BoNT/B in both local paralysis and systemic toxicity models, demonstrating that multiple nanobodies can be delivered simultaneously using this platform, and a single agent can thus be created to target multiple toxins.

[0308] The delivery platform is a 150 kDa chimeric protein, with one third derived from the H_{C} of a BoNT, and two thirds derived from the recently discovered BoNT-like toxin BoNT/X. The Hc of BoNT confers specificity toward neurons. The BoNT/X fragment includes an inactive form of LCH_{N} with LC catalytic activity abolished through mutations. The key finding here is that the chimeric protein containing ^{ci}LCH_{N}/X showed no toxicity in mice even at 100 mg/Kg, which allowed us to create a safe and effective protein-based delivery platform.

[0309] The molecular basis for the lack of toxicity of ^{ci}LCH_{N}/X in mice remains to be determined. BoNT/X is a newly identified BoNT-like toxin, sharing ˜28-30% sequence identity with other BoNTs and the overall conserved domain arrangement⁴⁰. Besides BoNT/X, two other BoNT-like toxins have been recently reported: one is BoNT/En, identified in an Enterococcus faecium strain^{52,53}, which shares 24-27% protein sequence identity to other BoNTs and 37% identity to BoNT/X. BoNT/En showed no toxicity in mice, and replacing its Hc with H_{C}/A resulted in a chimeric toxin that potently induced muscle paralysis in mice, suggesting that mice lack the proper receptor for BoNT/En. The other BoNT-like toxin is designated PMP1 (paraclostridial mosquitocidal protein 1), identified by screening bacteria that kill anopheles mosquito larvae⁵⁴. PMP1 shares 36% protein sequence identity with BoNT/X and 34% with BoNT/En, and the three of them form a distinct cluster within the BoNT superfamily. The natural hosts targeted by BoNT/X and BoNT/En remain unknown, while PMP1 appears to target mosquito larvae. It will be interesting to characterize ^{ci}LCH_{N} of BoNT/En and PMP1 to determine whether they share this characteristic of no toxicity in mice with ^{ci}LCH_{N}/X.

[0310] The constructed and tested fusion of ^{ci}LCH_{N}/X to three different H_{C}s: H_{C}/A, H_{C}/C, and H_{C}/D. A8-^{ci}BoNT/XA and A8-^{ci}BoNT/XC showed similar levels of efficacy in reducing SNAP-25 cleavage in cultured neurons, but 60 ng of A8-^{ci}BoNT/XA achieved better reduction in paralysis in DAS assays than 6 μg of A8-^{ci}BoNT/XC in vivo. These data suggest that A8-^{ci}BoNT/XC is less effective (or less stable) in vivo compared with A8-^{ci}BoNT/XA. A8-^{ci}BoNT/XD showed lower efficacy in reducing SNAP-25 cleavage than A8-^{ci}BoNT/XA or A8-^{ci}BoNT/XC, and its in vivo efficacy is lower than A8-^{ci}BoNT/XC. These data indicate that the choice of H_{C} affects delivery and in vivo efficacy. Potential structural conflicts between ^{ci}LCH_{N} and Hc might contribute to instability of the protein, reducing efficacy. It will be interesting to further optimize the choice of H_{C}s, as an alternative Hc other than Hc/A has the benefit of not immunizing patients against BoNT/A, thus preserving the possibility of treating patients with BoNT/A in the future.

[0311] These studies demonstrate that nanobodies can be effectively delivered into motor neurons in their functional form using this delivery platform. Interestingly, at least two tandemly fused nanobodies can be translocated into the cytosol of neurons as efficiently as a single nanobody. This allows us to develop a single agent that can simultaneously target two distinct toxins. Furthermore, dimers of two nanobodies targeting the same toxin may also be utilized to enhance the binding and inhibition of the target toxin as previously reported⁵⁵.

[0312] Nanobodies are one of the most versatile small antibody-derived protein binders that can be readily developed against any protein of interest. Besides binding and inhibiting the target protein directly, the therapeutic potential of nanobodies might be further enhanced by promoting degradation of the target protein via fusion with a protein degradation signal (degron) or a moiety that recruits E3-ubiquitin ligase. This is similar to the proteolysis-targeting chimeras (PROTACs) approach⁵⁶⁻⁵⁷, but using nanobodies rather than chemical probes for targeting the protein of interest. It has been shown that expression of A8 fused with a 15 kDa F-box domain, which recruits E3-ubiquitin ligase, accelerated degradation of LC/A in cells⁴¹. More generally, the approach of fusing of a nanobody to a protein domain recruiting E3-ubiquitin ligase to induce degradation of the target protein has been well established in cells and in model organisms⁵⁸⁻⁶². However, these previous studies lacked a way to deliver the fusion protein into cells and relied on transfection or transgenic approaches. The delivery platform reported here will enable the use of nanobody fusion proteins or nanobody conjugated with a chemical ligand to induce degradation of intracellular targets.

[0313] The range of proteins that can be efficiently delivered by this delivery platform remains to be explored experimentally. Bade et al. showed that the translocation efficacy of proteins fused to BoNT/D are influenced not only by size, but more importantly by structural rigidity³¹. For instance, firefly luciferase (62 kDa) fused to BoNT/D was translocated into neurons at a higher rate than GFP (27 kDa). Furthermore, fusion of DHFR (25 kDa) to BoNT/D did not affect translocation of BoNT/D, but when DHFR is stabilized by binding to folate analogue Mtx, it reduced translocation of the fusion protein 10-fold. It is interestingly to note that firefly luciferase fused with BoNT/D was translocated at 14-fold lower efficacy compared with BoNT/D alone, while A8 fusion to BoNT/XA showed a similar range of reduction (˜7.4-fold) in translocation efficacy compared with BoNT/XA. The major limiting factor for any protein-based delivery platform is likely the generation of neutralizing antibodies over time, which renders repeated usage less effective. This issue could be ameliorated through additional protein engineering of deimmunization. This however is not an issue for treating botulism, which likely involves only a single treatment event.

[0314] In summary, a neuron-specific delivery platform was created based on a chimeric toxin approach by combining the neuronal specificity of the BoNT-Hc and the unique non-toxic property of the de-activated LCH_{N} of BoNT/X. Based on this platform, a safe and effective post-exposure treatment was developed for BoNT/A and BoNT/B. The modular nature of these wechimeric toxins offers a general approach to targeting distinct cell types through changing the receptor-binding domain. Furthermore, different types of cargoes, such as therapeutic peptide/proteins, small molecules, and potentially DNA/RNA, can be conjugated to the delivery system, with the potential to target and modulate previously hard-to-reach cytosolic targets.

### Methods

### Study Design

[0315] The objective of this study is to establish a drug delivery platform to target and inhibit botulinum neurotoxins (BoNTs) within the cytosol of neurons to provide a post-exposure treatment for BoNT intoxication and botulism. A catalytically inactive chimeric toxin-based delivery vehicle was created and utilized nanobodies against BoNTs as therapeutic cargoes. The nanobody-delivery vehicle fusion proteins were expressed in E. coli and purified as His6-tagged proteins. The toxicity to mice via IP injections was first evaluated, and the delivery of nanobodies into the cytosol of cultured rat cortical neurons was then examined, followed by assessing the therapeutic effect in vivo using both a local muscle paralysis model and a systemic toxicity model in mice. Experiments were carried out three times independently. The sample sizes were selected based on previous literature and noted in each figure. The humane endpoint was defined based on clinical scores and body weight reduction (FIG. 18). Mice were randomly assigned to either treatment or control groups. For all animal experiments, investigators were not blinded to the treatment/control groups or the data analysis. All procedures using mice were conducted in accordance with the guidelines approved by the Institute Animal Care and Use Committee at Boston Children's Hospital (#18-10-3794R).

### Materials

[0316] Goat Anti-Llama IgG H&L (HRP) (ab112786, 1:500) was purchased from Abcam (Cambridge, United Kingdom). Mouse monoclonal antibodies for Syntaxin 1 (Cl 78.2, 1:3,000), SNAP-25 (C171.1, 1:2,000), and VAMP2 (Cl 69.1, 1:1,000) were purchased from Synaptic Systems (Gottingen, Germany). The following antibodies were purchased from the indicated vendors: rabbit polyclonal antibody for Synapsin (Millipore); mouse monoclonal antibody for actin (AC-15, Sigma, 1:1,000). The human monoclonal antibody against BoNT/A (Raz-1, 1:1,000) was generously provided by Jianlong Lou and James Marks (San Francisco, Calif.). BoNT/A and BoNT/B were purchased from Metabiologics (Madison, Wis., USA).

### Plasmid Construction

[0317] The cDNA encoding A8 (GenBank: FJ643070.1) and J10 were synthesized by IDT (Coralville, Iowa). Plasmids were constructed using PCR and NEBuilder® HiFi DNA Assembly Master Mix (New England Biolabs, Beverly, Mass.). The composition of all constructs in this study is summarized in FIG. 19. The cDNAs encoding ^{ci}BoNT/XA (LC/X, residues 1-422; H_{N}/X, residues 468-924; H_{C}/A, residues 873-1296) were cloned into pET28a vector with a His6-tag fused to its C-terminus. Three amino acids in LC/X were mutated (residues E228Q, R360A, and Y363F) by site-directed mutagenesis. Three thrombin cleavage sites were introduced to the locations between LC/X and H_{N}/X, between Hc and the His6-tag, and between the N-terminal thioredoxin tag (TrxA) and LC/X. A8-^{ci}BoNT/XA, XC, and XD chimera (Hc/C, residues 868-1291; Hc/D, residues 864-1276) were cloned into pET28a vectors with His6-tag on their N-termini. Flexible 10-amino acid linker (Gly4Ser)₂ was introduced between A8 and LC/X. ^{ci}BoNT/C (E230Q, R372A, and Y375F), A8-^{ci}BoNT/C, and ^{ci}BoNT/A (E224Q, R363A, and Y366F) were sub-cloned into pET28a vector. A8, J10, and A8-J10 were cloned into pET28a vector with TrxA tag at N-termini and His6-tag at C-termini. A8-J10-^{ci}BoNT/XA was cloned into pET28a vector. Catalytically active LCH_{N}/X, A8-LCH_{N}/X, and A8-J10-LCH_{N}/X were cloned into pET28a vector with the sortase tag sequence “LPETGG” fused to their C-termini, followed by a His6-tag. Rat SV2C-L4 (residues 473-567) and Rat VAMP2 (1-93) was cloned into pGEX-4T-1. The construct encoding His6-tagged sortase (SrtA*) was generously provided by B. Pentelute (Boston, Mass., USA).

### Protein Expression, Purification, and Activation

[0318] Plasmids were transformed into E. coli BL21 (DE3). Cells were cultured at 37° C. and 300 rpm shaking in 2 L baffled flasks containing 400 mL of autoinduction medium (Formedium). Once the OD₆₀₀ reached 0.4-0.6, the temperature was decreased to 16° C., and further incubated for 18-24 h. The cells were harvested at 4,000 rpm for 30 min and stored at −80° C. For A8-J10-^{ci}BoNT/XA expression, the plasmid was transformed into SHuffle T7 Express E. coli (NEB). Cells were cultured at 30° C. and 250 rpm shaking in 2 L baffled flasks containing 1,000 mL of Terrific Broth medium. Expression was induced with 0.4 mM IPTG when OD₆₀₀ reached 0.5-0.8, then the temperature was decreased to 16° C., and further cultured for 18 h. The cells were harvested at 4,000 rpm for 30 min and stored at −80° C.

[0319] All protein purification steps were performed at 4° C. Bacterial cells for ^{ci}BoNT or nanobody-^{ci}BoNT were disrupted by sonication in the binding buffer (20 mM Tris-HCl pH 7.5, 500 mM NaCl, 10% glycerol, 20 mM imidazole, 1 mM PMSF). Lysates were centrifuged at 20,000 rpm for 30 min at 4° C. The supernatant was loaded on to a HisTrap HP (5 mL, GE) and washed with the binding buffer. Proteins were eluted by a linear gradient of 20-250 mM of imidazole over 50 mL. Target proteins were collected based on molecular weight and concentrated using Vivaspin (GE Healthcare, cut-off 100 kDa). To generate the di-chain form of ^{ci}BoNT, proteins were proteolytically cleaved with thrombin (2 U/mg protein, Millipore) at 4° C. overnight. The proteins were further purified using size-exclusion column (Superdex 200 pg 16/60, GE Health care) in 20 mM Tris-HCl pH 7.5, 150 mM NaCl. The elution peak was collected and concentrated using Vivaspin (100 kDa MWCO). Proteins were passed through an endotoxin removal resin (Thermo scientific) and sterilized using 0.22 μm filters (Millipore). Purified proteins were aliquoted (50-100 μL/tube) and stored at −80° C.

[0320] A8 and A8-J10 were purified using a HisTrap column. For removing the TrxA tag, the elution was treated with thrombin at 4° C. overnight and passed through a PD-10 column (GE Healthcare) equilibrated in the binding buffer. Elutions were incubated with Ni-NTA beads at room temperature (RT) for 30 min and washed three times using the binding buffer. The A8 and A8-J10 were eluted using 250 mM imidazole and concentrated using Vivaspin (10 kDa MWCO). The proteins were further purified using size-exclusion column (Superdex 75 10/30, GE Health care) in 20 mM Tris-HCl pH 7.5, 150 mM NaCl. LCH_{N}/X, A8-LCH_{N}/X, A8-J10-LCH_{N}/X, and H_{C}/A were purified using HisTrap column. The proteins were further purified using size-exclusion column (Superdex 200 pg 16/60) in 20 mM Tris-HCl pH 7.5, 150 mM NaCl, and 10% glycerol.

### Neuron Cultures

[0321] Pregnant rats were purchased from Charles River. 24-well plates were coated with poly-D-lysine (0.5 mg/mL in deionized water) at 37° C. for 3 h and washed three times with deionized water. Primary rat cortical neurons were prepared from E18-19 embryos using a papain dissociation kit (Worthington Biochemical). Pregnant rats were euthanized by CO₂ asphyxiation and embryos removed. Dissected cortical tissue was dissociated in papain solution at 37° C. for 60 min. Cortical neurons were plated on poly-D-lysine coated 24-well plates at a density of 250,000 cells/well (for western-blot) or 150,000 cells/well (for immunostaining) in 1 mL of culture medium (Neurobasal medium containing 1× B27, 0.5% FBS).

### Detection of Nanobody in the Cytosol of Neuron

[0322] Neurons were exposed to A8-^{ci}BoNT/XA with or without 100 nM of bafilomycin A1 in medium for 12 h. Cells were washed with PBS three times and lysed with 100 μL of lysis buffer (PBS containing 1% Triton X-100, 0.05% SDS, protease inhibitor cocktail tablet (Thermo scientific)). Lysates were centrifuged for 10 min at 4° C. The supernatant was mixed with SDS-sample buffer (62.5 mM Tris-HCl pH 6.8, 2% SDS, 10% glycerol, 0.005% bromophenol blue) without DTT and subjected to immunoblot analysis under non-reducing conditions to detect translocated A8-^{ci}LC/X. The A8-^{ci}LC/X and A8-^{ci}BoNT/XA were detected using HRP-conjugated goat anti-llama IgG via enhanced chemiluminescence (Thermo Scientific Pierce, #32106).

### Post-Exposure Inhibition of BoNT/A in Cultured Cortical Neurons

[0323] Neurons were cultured in 1.5 mL cultured medium. After 11 days in vitro, the 1,200 μL of culture medium were collected and used as a conditioned medium. Neurons were exposed to 20 pM BoNT/A in 300 μL of the conditional medium at 37° C. for 12 h. Cells were washed two times with the medium to remove residual BoNTs, and incubated in 300 μL of the medium for 24 h. Neurons were further exposed to A8-^{ci}BoNT/XA in 400 μL of the medium for 48 h, and then lysed with 200 μL of lysis buffer. Lysates were centrifuged for 10 min at 4° C. Supernatants were subjected to SDS-PAGE and immunoblot analysis.

### Immunostaining

[0324] A8-^{ci}BoNT/XA (200 nM) and GST-SV2C-L4 (2 μM) were incubated for 20 min at 37° C. Neurons were exposed to the mixture in medium for 8 min at 37° C. Cells were washed with ice-cold PBS and fixed with PBS containing 4% paraformaldehyde for 20 min at RT. Cells were treated with PBS containing 10% goat normal serum for 45 min and exposed to human anti-BoNT/A antibody (1:500) and rabbit anti-Synapsin antibody (1:600) at 4° C. overnight. Cells were washed with PBS and incubated with Alexa-488 goat anti-human IgG and Alexa-546 goat anti-rabbit IgG (1:800) for 1 h. The coverslip was then mounted on a slide and images were collected using a fluorescence microscope (Olympus IX81).

### Sortase-Mediated Ligation and Assessing Translocation Efficacy

[0325] HA-tagged H_{C}/A was cleaved overnight at 4° C. by thrombin to expose the glycine residue at the N-terminus. The ligation reaction was set up in 50 μL Tris buffer pH 7.5, with H_{C}/A (40 μM), LCH_{N}/X, A8-LCH_{N}/X or A8-J10-LCH_{N}/X (4 μM), Ca²⁺ (10 mM), and sortase (0.5 μM) for 45 min at RT. The Ca²⁺ and sortase were removed using a Vivaspin concentrator (100 kDa MWCO, GE). The ligation products were activated by thrombin treatment (0.4 U) for 30 min at RT. Ligated products were subjected to SDS-PAGE and the concentration was quantified using ImageJ software. Neurons were exposed to ligated products in 300 μL cultured medium for 12 h at 37° C. Cell lysates were subjected to immunoblot analysis detecting cleavage of VAMP2.

### Cleavage of Recombinant VAMP2 by LC/X, A8-LC/X, and A8-J10-LC/X

[0326] VAMP2 (1-93) was expressed and purified as a GST-tagged protein. LCH_{N}/X, A8-LCH_{N}/X, and A8-J10-LCH_{N}/X were activated with thrombin treatment and incubated with DTT to generate LC/X, A8-LC/X, and A8-J10-LC/X. GST-VAMP2 (4 μM) were incubated with LC/X, A8-LC/X, or A8-J10-LC/X (300, 100, 30 or 10 nM) for 2 min at 37° C. Samples were analyzed by SDS-PAGE and Coomassie blue staining.

### Brain Detergent Extract Preparation and In Vitro Toxin Neutralization Assay

[0327] Rat brain detergent extracts (BDE) were prepared as previously described⁴⁰. The LC/A (1 μM, final concentration), or LC/B (1 μM) was pre-incubated with A8, A8-^{ci}BoNT/XA, or A8-J10-^{ci}BoNT/XA in 15 μL Tris buffer pH7.5 for 30 min at RT. The mixtures were then added to 15 μL BDE (2 mg/mL) and incubated for 1 h at 37° C. Samples were subjected to SDS-PAGE and immunoblot analysis.

### Digit Abduction Score (DAS) Assay

[0328] Male mice (CD-1 strain, 20-30 g) were purchased from Envigo. BoNTs were diluted in 0.2% gelatin-phosphate buffer pH 6.3. Mice were anesthetized with isoflurane and administered 10 μL BoNT/A (6 pg) or BoNT/B (3.6 pg) by IM injection into the gastrocnemius muscle of the right hind limb using a 30-gauge needle attached to a Hamilton syringe. Mice were scored for DAS response by muscle paralysis and the spread of hind toe digit abduction starting 18 h following BoNT injection. The degree of digit abduction was scored on a five-point scale (0; normal, to 4; maximal paralysis, FIG. 8A). Mice were monitored once per day for 10 days, then further monitored once every other day until fully recovered from the paralysis.

### Mouse Lethality Assay and Systemic Post-Exposure Treatment Model

[0329] Mice were administered a lethal dose of BoNT/A (19.5 pg) or BoNT/B (10 pg) in 100 μL of 0.2% gelatin-Phosphate buffer pH 6.3 through IP injection. After 9 h, mice that developed typical botulism phenotypes such as wasp waist were selected and randomly assigned to either treatment or control groups. These mice were then administered vehicle control (0.2% gelatin-PBS), a mixture of A8 and ^{ci}BoNT/XA, A8-J10-^{ci}BoNT/XA, A8-^{ci}BoNT/XA or A8-J10-^{ci}BoNT/XA in 0.2% gelatin-PBS by IP injection. Mice were monitored once per every 2 h for 14 h, followed by three times per day for 5 days, and then once every other day for 21 days. Survival rates, clinical scores (FIG. 18), and body weight were recorded. The humane endpoint was set as total clinical score above 5.

### Statistical Analysis

[0330] Statistical analysis was performed using GraphPad Prism 8.3 software. The statistical significance of the observed differences was calculated using one- or two-way ANOVA with Dunnett post-hoc tests. Survival curves were analyzed using Log-rank (Mantel-Cox) test. Results were considered significant when P<0.05.

TABLE 2
Amino Acid Sequences

| | | SEQ ID |
|---|---|---|
| Name | Amino Acid Sequence | NO |
| BoNT/X (GenBank | MKLEINKFNYNDPIDGINVITMRPPRHSDKINKGKGPFKAFQVIKNIWIVP | 1 |
| No. BAQ12790.1) | ERYNFTNNTNDLNIPSEPIMEADAIYNPNYLNTPSEKDEFLQGVIKVLERI | |
| | KSKPEGEKLLELISSSIPLPLVSNGALTLSDNETIAYQENNNIVSNLQANLV | |
| | IYGPGPDIANNATYGLYSTPISNGEGTLSEVSFSPFYLKPFDESYGNYRSL | |
| | VNIVNKFVKREFAPDPASTLMHELVHVTHNLYGISNRNFYYNFDTGKIET | |
| | SRQQNSLIFEELLTFGGIDSKAISSLIIKKIIETAKNNYTTLISERLNTVTVEN | |
| | DLLKYIKNKIPVQGRLGNFKLDTAEFEKKLNTILFVLNESNLAQRFSILVR | |
| | KHYLKERPIDPIYVNILDDNSYSTLEGFNISSQGSNDFQGQLLESSYFEKIE | |
| | SNALRAFIKICPRNGLLYNAIYRNSKNYLNNIDLEDKKTTSKTNVSYPCSL | |
| | LNGCIEVENKDLFLISNKDSLNDINLSEEKIKPETTVFFKDKLPPQDITLSN | |
| | YDFTEANSIPSISQQNILERNEELYEPIRNSLFEIKTIYVDKLTTFHFLEAQN | |
| | IDESIDSSKIRVELTDSVDEALSNPNKVYSPFKNMSNTINSIETGITSTYIFY | |
| | QWLRSIVKDFSDETGKIDVIDKSSDTLAIVPYIGPLLNIGNDIRHGDFVGAI | |
| | ELAGITALLEYVPEFTIPILVGLEVIGGELAREQVEAIVNNALDKRDQKW | |
| | AEVYNITKAQWWGTIHLQINTRLAHTYKALSRQANAIKMNMEFQLANY | |
| | KGNIDDKAKIKNAISETEILLNKSVEQAMKNTEKFMIKLSNSYLTKEMIPK | |
| | VQDNLKNFDLETKKTLDKFIKEKEDILGTNLSSSLRRKVSIRLNKNIAFDI | |
| | NDIPFSEFDDLINQYKNEIEDYEVLNLGAEDGKIKDLSGTTSDINIGSDIEL | |
| | ADGRENKAIKIKGSENSTIKIAMNKYLRFSATDNFSISFWIKHPKPTNLLN | |
| | NGIEYTLVENFNQRGWKISIQDSKLIWYLRDHNNSIKIVTPDYIAFNGWN | |
| | LITITNNRSKGSIVYVNGSKIEEKDISSIWNTEVDDPIIFRLKNNRDTQAFTL | |
| | LDQFSIYRKELNQNEVVKLYNYYFNSNYIRDIWGNPLQYNKKYYLQTQD | |
| | KPGKGLIREYWSSFGYDYVILSDSKTITFPNNIRYGALYNGSKVLIKNSKK | |
| | LDGLVRNKDFIQLEIDGYNMGISADRFNEDTNYIGTTYGTTHDLTTDFEII | |
| | QRQEKYRNYCQLKTPYNIFHKSGLMSTETSKPTFHDYRDWVYSSAWYF | |
| | QNYENLNLRKHTKTNWYFIPKDEGWDED | |
| BoNT/En | MVTINDLHYSDPIDEDNIINMRIPLYDLEVDDQFINHNVPDLKAFQVFPNV | 2 |
| (GenBank No. | WVVPERYTFYSTMKNLDAPANPSRSSYYDPTYLQSDAEKEVFLQQMILL | |
| OTO22244.1) | FKRINSTQEGQQFLNLLSRSIPVPYESNGDVAMGTTQVIKQMDDKGNVL | |
| | KHRRAHIIIYGPGPDLMAKGSKALTKSRETGRGCMAEIYFSPMYHKTYST | |
| | KLTNKNSLVDKSVQEFVPDPAVTLIHELCHGLHALYGIDLGNVGSWEFN | |
| | SNPNSLFSSWFSSKEAVNFEEVMTFGGEDVKVIKSEIDKKIPGILNLIKTTV | |
| | EPIINKITDPHDEMLQCLQSKYPSLKGTLGQFFFDDTQLEKDIRDLWMVM | |
| | NETMFAENLKALTRARYLVPKVENIVQVDILSPNVYTIDKGFNHLSKGFK | |
| | GQSVSQSYFRKISALARGAVVRACPNPHFSSQRGLSSCIEILEDDLFIMSS | |
| | KDSFTDTDFSEPSVGPVSYKAKKGADTILDSTLSNYDFSKEINFTSTVPIIT | |
| | VEDPLETDEDVPVISEDRTVYVDDYTTFHFLEAQKIGKEVVPTQTKVVFT | |
| | TNMEEALFDSKKVYTVFENTASRINEAGTGIANGMMFYQWLKGIVQDFT | |
| | EEATQKDTFDKISDVTMIVPYLGNILNIGNDIRKGDFMGAVELGGVTILLE | |
| | AIPELTLPVLIGLTIIEDELEKEQVSQTVYNVLDKRDEKWEEVYGFVKQQ | |
| | WWWMVHTQFETRILHAYQALNHQVEAIKANMTYQLANYRGNQEDKEL | |
| | LEKAIDDTLQSLYYAVDQAMHNIKRFLIQSSKSYLLNQMLPKTKEQLLAF | |
| | DQQTLRNVNDFINKNQGVLGESLAKDLKKKVEKRLTSLPVFNLEDLPISE | |
| | FEDLIHSHEIDIQDSEVLNIGVNNGKIQDLSGENTPLTLGENLHIVNGRDN | |
| | QAVRLNNQLDSKLEIQSRPNIHFTAFEDFSISIWIRCSMLRNNRNRGQKYT | |
| | IIQQFNKYGWQLAIQDSVFVWTLHDTFNNQIQLTSGSALTNKNYLLQNF | |
| | WLHITVTNKRSEKSRLYINGVLQDQKDISVLGNCHPKEPILFSIQDNSDPN | |
| | YFVRFEQFNVYRKALTDSEVNRLYWKYFEGSYLRDVWGERLTYNRDYY | |
| | MQLSTLPGRGIKREYRTWSGFDYIILSELGTQKIPTHEVTYPKLYQGQKIT | |
| | IHSDGKNLEPHVKSNKNIRLKIDDFYIGVVNPFKLPEWRPESGAYVVTTY | |
| | NHAEDLCLYFRTRSSSQSLYYGQLIMNDGRNKSLLNYTLKGSTYWIWSS | |
| | AWYYENYNTSSKTAGNWYFIPVDEGWKED | |
| BoNT/PMP1 | MLQIRVFNYNDPIDGENIVELRYHNRSPVKAFQIVDGIWIIPERYNFTNDT | 85 |
| | KKVPDDRALTILEDEVFAVRENDYLTTDVNEKNSFLNNITKLFKRINSSNI | |
| | GNQLLNYISTSVPYPVVSTNSIKARDYNTIKFDSIDGRRITKSANVLIYGPS | |
| | MKNLLDKQTRAINGEEAKNGIGCLSDIIFSPNYLSVQTVSSSRFVEDPASS | |
| | LTHELIHALHNLYGIQYPGEEKFKFGGFIDKLLGTRECIDYEEVLTYGGK | |
| | DSEIIRKKIDKSLYPDDFVNKYGEMYKRIKGSNPYYPDEKKLKQSFLNRM | |
| | NPFDQNGTFDTKEFKNHLMDLWFGLNESEFAKEKKILVRKHYITKQINP | |
| | KYTELTNDVYTEDKGFVNGQSIDNQNFKIIDDLISKKVKLCSITSKNRVNI | |
| | CIDVNKEDLYFISDKEGFENIDFSEPEIRYDSNVTTATTSSFTDHFLVNRTF | |
| | NDSDRFPPVELEYAIEPAEIVDNTIMPDIDQKSEISLDNLTTFHYLNAQKM | |
| | DLGFDSSKEQLKMVTSIEESLLDSKKVYTPFTRTAHSVNERISGIAESYLF | |
| | YQWLKTVINDFTDELNQKSNTDKVADISWIIPYVGPALNIGLDLSHGDFT | |
| | KAFEDLGVSILFAIAPEFATISLVALSIYENIEEDSQKEKVINKVENTLARRI | |
| | EKWHQVYAFMVAQWWGMVHTQIDTRIHQMYESLSHQIIAIKANMEYQ | |
| | LSHYKGPDNDKLLLKDYIYEAEIALNTSANRAMKNIERFMIESSISYLKN | |
| | NLIPSVVENLKKFDADTKKNLDQFIDKNSSVLGSDLHILKSQVDLELNPT | |
| | TKVAFNIQSIPDFDINALIDRLGIQLKDNLVFSLGVESDKIKDLSGNNTNLE | |
| | VKTGVQIVDGRDSKTIRLNSNENSSIIVQKNESINFSYFSDFTISFWIRVPRL | |
| | NKNDFIDLGIEYDLVNNMDNQGWKISLKDGNLVWRMKDRFGKIIDIITSL | |
| | TFSNSFIDKYISSNIWRHITITVNQLKDCTLYINGDKIDSKSINELRGIDNNS | |
| | PIIFKLEGNRNKNQFIRLDQFNIYQRALNESEVEMLFNSYFNSNILRDFWG | |
| | EPLEYNKSYYMINQAILGGPLRSTYKSWYGEYYPYISRMRTFNVSSFILIP | |
| | YLYHKGSDVEKVKIINKNNVDKYVRKNDVADVKFENYGNLILTLPMYS | |
| | KIKERYMVLNEGRNGDLKLIQLQSNDKYYCQIRIFEMYRNGLLSIADDEN | |
| | WLYSSGWYLYSSGWYLDNYKTLDLKKHTKTNWYFVSEDEGWKE | |
| ^{8ci}LC-Hn/X | MKLEINKFNYNDPIDGINVITMRPPRHSDKINKGKGPFKAFQVIKNIWIVP | 3 |
| | ERYNFTNNTNDLNIPSEPIMEADAIYNPNYLNTPSEKDEFLQGVIKVLERI | |
| | KSKPEGEKLLELISSSIPLPLVSNGALTLSDNETIAYQENNNIVSNLQANLV | |
| | IYGPGPDIANNATYGLYSTPISNGEGTLSEVSFSPFYLKPFDESYGNYRSL | |
| | VNIVNKFVKREFAPDPASTLMHQLVHVTHNLYGISNRNFYYNFDTGKIE | |
| | TSRQQNSLIFEELLTFGGIDSKAISSLIIKKIIETAKNNYTTLISERLNTVTVE | |
| | NDLLKYIKNKIPVQGRLGNFKLDTAEFEKKLNTILFVLNESNLAQRFSILV | |
| | AKHFLKERPIDPIYVNILDDNSYSTLEGFNISSQGSNDFQGQLLESSYFEKI | |
| | ESNALRAFIKICPRNGLLYNAIYRNSKNYLNNIDLEDKKTTSKTNVSYPCS | |
| | LLNGCIEVENKDLFLISNKDSLNDINLSEEKIKPETTVFFKDKLPPQDITLS | |
| | NYDFTEANSIPSISQQNILERNEELYEPIRNSLFEIKTIYVDKLTTFHFLEAQ | |
| | NIDESIDSSKIRVELTDSVDEALSNPNKVYSPFKNMSNTINSIETGITSTYIF | |
| | YQWLRSIVKDFSDETGKIDVIDKSSDTLAIVPYIGPLLNIGNDIRHGDFVG | |
| | AIELAGITALLEYVPEFTIPILVGLEVIGGELAREQVEAIVNNALDKRDQK | |
| | WAEVYNITKAQWWGTIHLQINTRLAHTYKALSRQANAIKMNMEFQLAN | |
| | YKGNIDDKAKIKNAISETEILLNKSVEQAMKNTEKFMIKLSNSYLTKEMIP | |
| | KVQDNLKNFDLETKKTLDKFIKEKEDILGTNLSSSLRRKVSIRLNKNIAFD | |
| | INDIPFSEFDDLINQYKNEIEDYEVLNLGAEDGKIKDLSGTTSDINIGSDIE | |
| ^{ci}LC-Hn/En | MVTINDLHYSDPIDEDNIINMRIPLYDLEVDDQFINHNVPDLKAFQVFPNV | 4 |
| | WVVPERYTFYSTMKNLDAPANPSRSSYYDPTYLQSDAEKEVFLQQMILL | |
| | FKRINSTQEGQQFLNLLSRSIPVPYESNGDVAMGTTQVIKQMDDKGNVL | |
| | KHRRAHIIIYGPGPDLMAKGSKALTKSRETGRGCMAEIYFSPMYHKTYST | |
| | KLTNKNSLVDKSVQEFVPDPAVTLIHQLCHGLHALYGIDLGNVGSWEFN | |
| | SNPNSLFSSWFSSKEAVNFEEVMTFGGEDVKVIKSEIDKKIPGILNLIKTTV | |
| | EPIINKITDPHDEMLQCLQSKYPSLKGTLGQFFFDDTQLEKDIRDLWMVM | |
| | NETMFAENLKALTAARFLVPKVENIVQVDILSPNVYTIDKGFNHLSKGFK | |
| | GQSVSQSYFRKISALARGAVVRACPNPHFSSQRGLSSCIEILEDDLFIMSS | |
| | KDSFTDTDFSEPSVGPVSYKAKKGADTILDSTLSNYDFSKEINFTSTVPIIT | |
| | VEDPLETDEDVPVISEDRTVYVDDYTTFHFLEAQKIGKEVVPTQTKVVFT | |
| | TNMEEALFDSKKVYTVFENTASRINEAGTGIANGMMFYQWLKGIVQDFT | |
| | EEATQKDTFDKISDVTMIVPYLGNILNIGNDIRKGDFMGAVELGGVTILLE | |
| | AIPELTLPVLIGLTIIEDELEKEQVSQTVYNVLDKRDEKWEEVYGFVKQQ | |
| | WWWMVHTQFETRILHAYQALNHQVEAIKANMTYQLANYRGNQEDKEL | |
| | LEKAIDDTLQSLYYAVDQAMHNIKRFLIQSSKSYLLNQMLPKTKEQLLAF | |
| | DQQTLRNVNDFINKNQGVLGESLAKDLKKKVEKRLTSLPVFNLEDLPISE | |
| | FEDLIHSHEIDIQDSEVLNIGVNNGKIQDLSGENTPLTLGENLH | |
| ^{ci}LC-Hn/PMP1 | MLQIRVFNYNDPIDGENIVELRYHNRSPVKAFQIVDGIWIIPERYNFTNDT | 86 |
| | KKVPDDRALTILEDEVFAVRENDYLTTDVNEKNSFLNNITKLFKRINSSNI | |
| | GNQLLNYISTSVPYPVVSTNSIKARDYNTIKFDSIDGRRITKSANVLIYGPS | |
| | MKNLLDKQTRAINGEEAKNGIGCLSDIIFSPNYLSVQTVSSSRFVEDPASS | |
| | LTHQLIHALHNLYGIQYPGEEKFKFGGFIDKLLGTRECIDYEEVLTYGGK | |
| | DSEIIRKKIDKSLYPDDFVNKYGEMYKRIKGSNPYYPDEKKLKQSFLNRM | |
| | NPFDQNGTFDTKEFKNHLMDLWFGLNESEFAKEKKILVAKHFITKQINPK | |
| | YTELTNDVYTEDKGFVNGQSIDNQNFKIIDDLISKKVKLCSITSKNRVNICI | |
| | DVNKEDLYFISDKEGFENIDFSEPEIRYDSNVTTATTSSFTDHFLVNRTFN | |
| | DSDRFPPVELEYAIEPAEIVDNTIMPDIDQKSEISLDNLTTFHYLNAQKMD | |
| | LGFDSSKEQLKMVTSIEESLLDSKKVYTPFTRTAHSVNERISGIAESYLFY | |
| | QWLKTVINDFTDELNQKSNTDKVADISWIIPYVGPALNIGLDLSHGDFTK | |
| | AFEDLGVSILFAIAPEFATISLVALSIYENIEEDSQKEKVINKVENTLARRIE | |
| | KWHQVYAFMVAQWWGMVHTQIDTRIHQMYESLSHQIIAIKANMEYQLS | |
| | HYKGPDNDKLLLKDYIYEAEIALNTSANRAMKNIERFMIESSISYLKNNLI | |
| | PSVVENLKKFDADTKKNLDQFIDKNSSVLGSDLHILKSQVDLELNPTTKV | |
| | AFNIQSIPDFDINALIDRLGIQ | |
| ^{ci}BoNT/XA | MKLEINKFNYNDPIDGINVITMRPPRHSDKINKGKGPFKAFQVIKNIWIVP | 5 |
| | ERYNFTNNTNDLNIPSEPIMEADAIYNPNYLNTPSEKDEFLQGVIKVLERI | |
| | KSKPEGEKLLELISSSIPLPLVSNGALTLSDNETIAYQENNNIVSNLQANLV | |
| | IYGPGPDIANNATYGLYSTPISNGEGTLSEVSFSPFYLKPFDESYGNYRSL | |
| | VNIVNKFVKREFAPDPASTLMHQLVHVTHNLYGISNRNFYYNFDTGKIET | |
| | SRQQNSLIFEELLTFGGIDSKAISSLIIKKIIETAKNNYTTLISERLNTVTVEN | |
| | DLLKYIKNKIPVQGRLGNFKLDTAEFEKKLNTILFVLNESNLAQRFSILVA | |
| | KHFLKERPIDPIYVNILDDNSYSTLEGFNISSQGSNDFQGQLLESSYFEKIE | |
| | SNALRAFIKICPRNGLLYNAIYRNSKNYLNNIDLEDKKTTSKTNVSYPCSL | |
| | LNGCIEVENKDLFLISNKDSLNDINLSEEKIKPETTVFFKDKLPPQDITLSN | |
| | YDFTEANSIPSISQQNILERNEELYEPIRNSLFEIKTIYVDKLTTFHFLEAQN | |
| | IDESIDSSKIRVELTDSVDEALSNPNKVYSPFKNMSNTINSIETGITSTYIFY | |
| | QWLRSIVKDFSDETGKIDVIDKSSDTLAIVPYIGPLLNIGNDIRHGDFVGAI | |
| | ELAGITALLEYVPEFTIPILVGLEVIGGELAREQVEAIVNNALDKRDQKW | |
| | AEVYNITKAQWWGTIHLQINTRLAHTYKALSRQANAIKMNMEFQLANY | |
| | KGNIDDKAKIKNAISETEILLNKSVEQAMKNTEKFMIKLSNSYLTKEMIPK | |
| | VQDNLKNFDLETKKTLDKFIKEKEDILGTNLSSSLRRKVSIRLNKNIAFDI | |
| | NDIPFSEFDDLINQYKNEIEDYEVLNLGAEDGKIKDLSGTTSDINIGSDIEII | |
| | NTSILNLRYESNHLIDLSRYASKINIGSKVNFDPIDKNQIQLFNLESSKIEVI | |
| | LKNAIVYNSMYENFSTSFWIRIPKYFNSISLNNEYTIINCMENNSGWKVSL | |
| | NYGEIIWTLQDTQEIKQRVVFKYSQMINISDYINRWIFVTITNNRLNNSKI | |
| | YINGRLIDQKPISNLGNIHASNNIMFKLDGCRDTHRYIWIKYFNLFDKELN | |
| | EKEIKDLYDNQSNSGILKDFWGDYLQYDKPYYMLNLYDPNKYVDVNNV | |
| | GIRGYMYLKGPRGSVMTTNIYLNSSLYRGTKFIIKKYASGNKDNIVRNND | |
| | RVYINVVVKNKEYRLATNASQAGVEKILSALEIPDVGNLSQVVVMKSKN | |
| | DQGITNKCKMNLQDNNGNDIGFIGFHQFNNIAKLVASNWYNRQIERSSR | |
| | TLGCSWEFIPVDDGWGERPLQ | |
| ^{ci}BoNT/XB | MKLEINKFNYNDPIDGINVITMRPPRHSDKINKGKGPFKAFQVIKNIWIVP | 6 |
| | ERYNFTNNTNDLNIPSEPIMEADAIYNPNYLNTPSEKDEFLQGVIKVLERI | |
| | KSKPEGEKLLELISSSIPLPLVSNGALTLSDNETIAYQENNNIVSNLQANLV | |
| | IYGPGPDIANNATYGLYSTPISNGEGTLSEVSFSPFYLKPFDESYGNYRSL | |
| | VNIVNKFVKREFAPDPASTLMHQLVHVTHNLYGISNRNFYYNFDTGKIET | |
| | SRQQNSLIFEELLTFGGIDSKAISSLIIKKIIETAKNNYTTLISERLNTVTVEN | |
| | DLLKYIKNKIPVQGRLGNFKLDTAEFEKKLNTILFVLNESNLAQRFSILVA | |
| | KHFLKERPIDPIYVNILDDNSYSTLEGFNISSQGSNDFQGQLLESSYFEKIE | |
| | SNALRAFIKICPRNGLLYNAIYRNSKNYLNNIDLEDKKTTSKTNVSYPCSL | |
| | LNGCIEVENKDLFLISNKDSLNDINLSEEKIKPETTVFFKDKLPPQDITLSN | |
| | YDFTEANSIPSISQQNILERNEELYEPIRNSLFEIKTIYVDKLTTFHFLEAQN | |
| | IDESIDSSKIRVELTDSVDEALSNPNKVYSPFKNMSNTINSIETGITSTYIFY | |
| | QWLRSIVKDFSDETGKIDVIDKSSDTLAIVPYIGPLLNIGNDIRHGDFVGAI | |
| | ELAGITALLEYVPEFTIPILVGLEVIGGELAREQVEAIVNNALDKRDQKW | |
| | AEVYNITKAQWWGTIHLQINTRLAHTYKALSRQANAIKMNMEFQLANY | |
| | KGNIDDKAKIKNAISETEILLNKSVEQAMKNTEKFMIKLSNSYLTKEMIPK | |
| | VQDNLKNFDLETKKTLDKFIKEKEDILGTNLSSSLRRKVSIRLNKNIAFDI | |
| | NDIPFSEFDDLINQYKNEIEDYEVLNLGAEDGKIKDLSGTTSDINIGSDIEIL | |
| | NNIILNLRYKDNNLIDLSGYGAKVEVYDGVELNDKNQFKLTSSANSKIRV | |
| | TQNQNIIFNSVFLDFSVSFWIRIPKYKNDGIQNYIHNEYTIINCMKNNSGW | |
| | KISIRGNRIIWTLIDINGKTKSVFFEYNIREDISEYINRWFFVTITNNLNNAK | |
| | IYINGKLESNTDIKDIREVIANGEIIFKLDGDIDRTQFIWMKYFSIFNTELSQ | |
| | SNIEERYKIQSYSEYLKDFWGNPLMYNKEYYMFNAGNKNSYIKLKKDSP | |
| | VGEILTRSKYNQNSKYINYRDLYIGEKFIIRRKSNSQSINDDIVRKEDYIYL | |
| | DFFNLNQEWRVYTYKYFKKEEEKLFLAPISDSDEFYNTIQIKEYDEQPTY | |
| | SCQLLFKKDEESTDEIGLIGIHRFYESGIVFEEYKDYFCISKWYLKEVKRK | |
| | PYNLKLGCNWQFIPKDEGWTE | |
| ^{ci}BoNT/XC | MKLEINKFNYNDPIDGINVITMRPPRHSDKINKGKGPFKAFQVIKNIWIVP | 7 |
| | ERYNFTNNTNDLNIPSEPIMEADAIYNPNYLNTPSEKDEFLQGVIKVLERI | |
| | KSKPEGEKLLELISSSIPLPLVSNGALTLSDNETIAYQENNNIVSNLQANLV | |
| | IYGPGPDIANNATYGLYSTPISNGEGTLSEVSFSPFYLKPFDESYGNYRSL | |
| | VNIVNKFVKREFAPDPASTLMHQLVHVTHNLYGISNRNFYYNFDTGKIET | |
| | SRQQNSLIFEELLTFGGIDSKAISSLIIKKIIETAKNNYTTLISERLNTVTVEN | |
| | DLLKYIKNKIPVQGRLGNFKLDTAEFEKKLNTILFVLNESNLAQRFSILVA | |
| | KHFLKERPIDPIYVNILDDNSYSTLEGFNISSQGSNDFQGQLLESSYFEKIE | |
| | SNALRAFIKICPRNGLLYNAIYRNSKNYLNNIDLEDKKTTSKTNVSYPCSL | |
| | LNGCIEVENKDLFLISNKDSLNDINLSEEKIKPETTVFFKDKLPPQDITLSN | |
| | YDFTEANSIPSISQQNILERNEELYEPIRNSLFEIKTIYVDKLTTFHFLEAQN | |
| | IDESIDSSKIRVELTDSVDEALSNPNKVYSPFKNMSNTINSIETGITSTYIFY | |
| | QWLRSIVKDFSDETGKIDVIDKSSDTLAIVPYIGPLLNIGNDIRHGDFVGAI | |
| | ELAGITALLEYVPEFTIPILVGLEVIGGELAREQVEAIVNNALDKRDQKW | |
| | AEVYNITKAQWWGTIHLQINTRLAHTYKALSRQANAIKMNMEFQLANY | |
| | KGNIDDKAKIKNAISETEILLNKSVEQAMKNTEKFMIKLSNSYLTKEMIPK | |
| | VQDNLKNFDLETKKTLDKFIKEKEDILGTNLSSSLRRKVSIRLNKNIAFDI | |
| | NDIPFSEFDDLINQYKNEIEDYEVLNLGAEDGKIKDLSGTTSDINIGSDIEIN | |
| | DSKILSLQNRKNTLVDTSGYNAEVSEEGDVQLNPIFPFDFKLGSSGEDRG | |
| | KVIVTQNENIVYNSMYESFSISFWIRINKWVSNLPGYTIIDSVKNNSGWSI | |
| | GIISNFLVFTLKQNEDSEQSINFSYDISNNAPGYNKWFFVTVTNNMMGNM | |
| | KIYINGKLIDTIKVKELTGINFSKTITFEINKIPDTGLITSDSDNINMWIRDFY | |
| | IFAKELDGKDINILFNSLQYTNVVKDYWGNDLRYNKEYYMVNIDYLNR | |
| | YMYANSRQIVFNTRRNNNDFNEGYKIIIKRIRGNTNDTRVRGGDILYFDM | |
| | TINNKAYNLFMKNETMYADNHSTEDIYAIGLREQTKDINDNIIFQIQPMN | |
| | NTYYYASQIFKSNFNGENISGICSIGTYRFRLGGDWYRHNYLVPTVKQGN | |
| | YASLLESTSTHWGFVPVSE | |
| ^{ci}BoNT/XD | MKLEINKFNYNDPIDGINVITMRPPRHSDKINKGKGPFKAFQVIKNIWIVP | 8 |
| | ERYNFTNNTNDLNIPSEPIMEADAIYNPNYLNTPSEKDEFLQGVIKVLERI | |
| | KSKPEGEKLLELISSSIPLPLVSNGALTLSDNETIAYQENNNIVSNLQANLV | |
| | IYGPGPDIANNATYGLYSTPISNGEGTLSEVSFSPFYLKPFDESYGNYRSL | |
| | VNIVNKFVKREFAPDPASTLMHQLVHVTHNLYGISNRNFYYNFDTGKIET | |
| | SRQQNSLIFEELLTFGGIDSKAISSLIIKKIIETAKNNYTTLISERLNTVTVEN | |
| | DLLKYIKNKIPVQGRLGNFKLDTAEFEKKLNTILFVLNESNLAQRFSILVA | |
| | KHFLKERPIDPIYVNILDDNSYSTLEGFNISSQGSNDFQGQLLESSYFEKIE | |
| | SNALRAFIKICPRNGLLYNAIYRNSKNYLNNIDLEDKKTTSKTNVSYPCSL | |
| | LNGCIEVENKDLFLISNKDSLNDINLSEEKIKPETTVFFKDKLPPQDITLSN | |
| | YDFTEANSIPSISQQNILERNEELYEPIRNSLFEIKTIYVDKLTTFHFLEAQN | |
| | IDESIDSSKIRVELTDSVDEALSNPNKVYSPFKNMSNTINSIETGITSTYIFY | |
| | QWLRSIVKDFSDETGKIDVIDKSSDTLAIVPYIGPLLNIGNDIRHGDFVGAI | |
| | ELAGITALLEYVPEFTIPILVGLEVIGGELAREQVEAIVNNALDKRDQKW | |
| | AEVYNITKAQWWGTIHLQINTRLAHTYKALSRQANAIKMNMEFQLANY | |
| | KGNIDDKAKIKNAISETEILLNKSVEQAMKNTEKFMIKLSNSYLTKEMIPK | |
| | VQDNLKNFDLETKKTLDKFIKEKEDILGTNLSSSLRRKVSIRLNKNIAFDI | |
| | NDIPFSEFDDLINQYKNEIEDYEVLNLGAEDGKIKDLSGTTSDINIGSDIEIN | |
| | DSKILSLQNKKNALVDTSGYNAEVRVGDNVQLNTIYTNDFKLSSSGDKII | |
| | VNLNNNILYSAIYENSSVSFWIKISKDLTNSHNEYTIINSIEQNSGWKLCIR | |
| | NGNIEWILQDVNRKYKSLIFDYSESLSHTGYTNKWFFVTITNNIMGYMKL | |
| | YINGELKQSQKIEDLDEVKLDKTIVFGIDENIDENQMLWIRDFNIFSKELS | |
| | NEDINIVYEGQILRNVIKDYWGNPLKFDTEYYIINDNYIDRYIAPESNVLV | |
| | LVQYPDRSKLYTGNPITIKSVSDKNPYSRILNGDNIILHMLYNSRKYMIIR | |
| | DTDTIYATQGGECSQNCVYALKLQSNLGNYGIGIFSIKNIVSKNKYCSQIF | |
| | SSFRENTMLLADIYKPWRFSFKNAYTPVAVTNYETKLLSTSSFWKFISRD | |
| | PGWVE | |
| ^{ci}BoNT/XE | MKLEINKFNYNDPIDGINVITMRPPRHSDKINKGKGPFKAFQVIKNIWIVP | 9 |
| | ERYNFTNNTNDLNIPSEPIMEADAIYNPNYLNTPSEKDEFLQGVIKVLERI | |
| | KSKPEGEKLLELISSSIPLPLVSNGALTLSDNETIAYQENNNIVSNLQANLV | |
| | IYGPGPDIANNATYGLYSTPISNGEGTLSEVSFSPFYLKPFDESYGNYRSL | |
| | VNIVNKFVKREFAPDPASTLMHQLVHVTHNLYGISNRNFYYNFDTGKIET | |
| | SRQQNSLIFEELLTFGGIDSKAISSLIIKKIIETAKNNYTTLISERLNTVTVEN | |
| | DLLKYIKNKIPVQGRLGNFKLDTAEFEKKLNTILFVLNESNLAQRFSILVA | |
| | KHFLKERPIDPIYVNILDDNSYSTLEGFNISSQGSNDFQGQLLESSYFEKIE | |
| | SNALRAFIKICPRNGLLYNAIYRNSKNYLNNIDLEDKKTTSKTNVSYPCSL | |
| | LNGCIEVENKDLFLISNKDSLNDINLSEEKIKPETTVFFKDKLPPQDITLSN | |
| | YDFTEANSIPSISQQNILERNEELYEPIRNSLFEIKTIYVDKLTTFHFLEAQN | |
| | IDESIDSSKIRVELTDSVDEALSNPNKVYSPFKNMSNTINSIETGITSTYIFY | |
| | QWLRSIVKDFSDETGKIDVIDKSSDTLAIVPYIGPLLNIGNDIRHGDFVGAI | |
| | ELAGITALLEYVPEFTIPILVGLEVIGGELAREQVEAIVNNALDKRDQKW | |
| | AEVYNITKAQWWGTIHLQINTRLAHTYKALSRQANAIKMNMEFQLANY | |
| | KGNIDDKAKIKNAISETEILLNKSVEQAMKNTEKFMIKLSNSYLTKEMIPK | |
| | VQDNLKNFDLETKKTLDKFIKEKEDILGTNLSSSLRRKVSIRLNKNIAFDI | |
| | NDIPFSEFDDLINQYKNEIEDYEVLNLGAEDGKIKDLSGTTSDINIGSDIEIK | |
| | SSSVLNMRYKNDKYVDTSGYDSNININGDVYKYPTNKNQFGIYNDKLSE | |
| | VNISQNDYIIYDNKYKNFSISFWVRIPNYDNKIVNVNNEYTIINCMRDNNS | |
| | GWKVSLNHNEIIWTLQDNAGINQKLAFNYGNANGISDYINKWIFVTITND | |
| | RLGDSKLYINGNLIDQKSILNLGNIHVSDNILFKIVNCSYTRYIGIRYFNIFD | |
| | KELDETEIQTLYSNEPNTNILKDFWGNYLLYDKEYYLLNVLKPNNFIDRR | |
| | KDSTLSINNIRSTILLANRLYSGIKVKIQRVNNSSTNDNLVRKNDQVYINF | |
| | VASKTHLFPLYADTATTNKEKTIKISSSGNRFNQVVVMNSVGNNCTMNF | |
| | KNNNGNNIGLLGFKADTVVASTWYYTHMRDHTNSNGCFWNFISEEHG | |
| | WQEK | |
| ^{ci}BoNT/XF | MKLEINKFNYNDPIDGINVITMRPPRHSDKINKGKGPFKAFQVIKNIWIVP | 10 |
| | ERYNFTNNTNDLNIPSEPIMEADAIYNPNYLNTPSEKDEFLQGVIKVLERI | |
| | KSKPEGEKLLELISSSIPLPLVSNGALTLSDNETIAYQENNNIVSNLQANLV | |
| | IYGPGPDIANNATYGLYSTPISNGEGTLSEVSFSPFYLKPFDESYGNYRSL | |
| | VNIVNKFVKREFAPDPASTLMHQLVHVTHNLYGISNRNFYYNFDTGKIET | |
| | SRQQNSLIFEELLTFGGIDSKAISSLIIKKIIETAKNNYTTLISERLNTVTVEN | |
| | DLLKYIKNKIPVQGRLGNFKLDTAEFEKKLNTILFVLNESNLAQRFSILVA | |
| | KHFLKERPIDPIYVNILDDNSYSTLEGFNISSQGSNDFQGQLLESSYFEKIE | |
| | SNALRAFIKICPRNGLLYNAIYRNSKNYLNNIDLEDKKTTSKTNVSYPCSL | |
| | LNGCIEVENKDLFLISNKDSLNDINLSEEKIKPETTVFFKDKLPPQDITLSN | |
| | YDFTEANSIPSISQQNILERNEELYEPIRNSLFEIKTIYVDKLTTFHFLEAQN | |
| | IDESIDSSKIRVELTDSVDEALSNPNKVYSPFKNMSNTINSIETGITSTYIFY | |
| | QWLRSIVKDFSDETGKIDVIDKSSDTLAIVPYIGPLLNIGNDIRHGDFVGAI | |
| | ELAGITALLEYVPEFTIPILVGLEVIGGELAREQVEAIVNNALDKRDQKW | |
| | AEVYNITKAQWWGTIHLQINTRLAHTYKALSRQANAIKMNMEFQLANY | |
| | KGNIDDKAKIKNAISETEILLNKSVEQAMKNTEKFMIKLSNSYLTKEMIPK | |
| | VQDNLKNFDLETKKTLDKFIKEKEDILGTNLSSSLRRKVSIRLNKNIAFDI | |
| | NDIPFSEFDDLINQYKNEIEDYEVLNLGAEDGKIKDLSGTTSDINIGSDIEIK | |
| | DNSILDMRYENNKFIDISGYGSNISINGDVYIYSTNRNQFGIYSSKPSEVNI | |
| | AQNNDIIYNGRYQNFSISFWVRIPKYFNKVNLNNEYTIIDCIRNNNSGWKI | |
| | SLNYNKIIWTLQDTAGNNQKLVFNYTQMISISDYINKWIFVTITNNRLGNS | |
| | RIYINGNLIDEKSISNLGDIHVSDNILFKIVGCNDTRYVGIRYFKVFDTELG | |
| | KTEIETLYSDEPDPSILKDFWGNYLLYNKRYYLLNLLRTDKSITQNSNFLN | |
| | INQQRGVYQKPNIFSNTRLYTGVEVIIRKNGSTDISNTDNFVRKNDLAYIN | |
| | VVDRDVEYRLYADISIAKPEKIIKLIRTSNSNNSLGQIIVMDSIGNNCTMNF | |
| | QNNNGGNIGLLGFHSNNLVASSWYYNNIRKNTSSNGCFWSFISKEHGWQ | |
| | EN | |
| ^{ci}BoNT/XG | MKLEINKFNYNDPIDGINVITMRPPRHSDKINKGKGPFKAFQVIKNIWIVP | 11 |
| | ERYNFTNNTNDLNIPSEPIMEADAIYNPNYLNTPSEKDEFLQGVIKVLERI | |
| | KSKPEGEKLLELISSSIPLPLVSNGALTLSDNETIAYQENNNIVSNLQANLV | |
| | IYGPGPDIANNATYGLYSTPISNGEGTLSEVSFSPFYLKPFDESYGNYRSL | |
| | VNIVNKFVKREFAPDPASTLMHQLVHVTHNLYGISNRNFYYNFDTGKIET | |
| | SRQQNSLIFEELLTFGGIDSKAISSLIIKKIIETAKNNYTTLISERLNTVTVEN | |
| | DLLKYIKNKIPVQGRLGNFKLDTAEFEKKLNTILFVLNESNLAQRFSILVA | |
| | KHFLKERPIDPIYVNILDDNSYSTLEGFNISSQGSNDFQGQLLESSYFEKIE | |
| | SNALRAFIKICPRNGLLYNAIYRNSKNYLNNIDLEDKKTTSKTNVSYPCSL | |
| | LNGCIEVENKDLFLISNKDSLNDINLSEEKIKPETTVFFKDKLPPQDITLSN | |
| | YDFTEANSIPSISQQNILERNEELYEPIRNSLFEIKTIYVDKLTTFHFLEAQN | |
| | IDESIDSSKIRVELTDSVDEALSNPNKVYSPFKNMSNTINSIETGITSTYIFY | |
| | QWLRSIVKDFSDETGKIDVIDKSSDTLAIVPYIGPLLNIGNDIRHGDFVGAI | |
| | ELAGITALLEYVPEFTIPILVGLEVIGGELAREQVEAIVNNALDKRDQKW | |
| | AEVYNITKAQWWGTIHLQINTRLAHTYKALSRQANAIKMNMEFQLANY | |
| | KGNIDDKAKIKNAISETEILLNKSVEQAMKNTEKFMIKLSNSYLTKEMIPK | |
| | VQDNLKNFDLETKKTLDKFIKEKEDILGTNLSSSLRRKVSIRLNKNIAFDI | |
| | NDIPFSEFDDLINQYKNEIEDYEVLNLGAEDGKIKDLSGTTSDINIGSDIEIS | |
| | SNAILSLSYRGGRLIDSSGYGATMNVGSDVIFNDIGNGQFKLNNSENSNIT | |
| | AHQSKFVVYDSMFDNFSINFWVRTPKYNNNDIQTYLQNEYTIISCIKNDS | |
| | GWKVSIKGNRIIWTLIDVNAKSKSIFFEYSIKDNISDYINKWFSITITNDRL | |
| | GNANIYINGSLKKSEKILNLDRINSSNDIDFKLINCTDTTKFVWIKDFNIFG | |
| | RELNATEVSSLYWIQSSTNTLKDFWGNPLRYDTQYYLFNQGMQNIYIKY | |
| | FSKASMGETAPRTNFNNAAINYQNLYLGLRFIIKKASNSRNINNDNIVRE | |
| | GDYIYLNIDNISDESYRVYVLVNSKEIQTQLFLAPINDDPTFYDVLQIKKY | |
| | YEKTTYNCQILCEKDTKTFGLFGIGKFVKDYGYVWDTYDNYFCISQWYL | |
| | RRISENINKLRLGCNWQFIPVDEGWTE | |
| ^{ci}BoNT/XH | MKLEINKFNYNDPIDGINVITMRPPRHSDKINKGKGPFKAFQVIKNIWIVP | 12 |
| | ERYNFTNNTNDLNIPSEPIMEADAIYNPNYLNTPSEKDEFLQGVIKVLERI | |
| | KSKPEGEKLLELISSSIPLPLVSNGALTLSDNETIAYQENNNIVSNLQANLV | |
| | IYGPGPDIANNATYGLYSTPISNGEGTLSEVSFSPFYLKPFDESYGNYRSL | |
| | VNIVNKFVKREFAPDPASTLMHQLVHVTHNLYGISNRNFYYNFDTGKIET | |
| | SRQQNSLIFEELLTFGGIDSKAISSLIIKKIIETAKNNYTTLISERLNTVTVEN | |
| | DLLKYIKNKIPVQGRLGNFKLDTAEFEKKLNTILFVLNESNLAQRFSILVA | |
| | KHFLKERPIDPIYVNILDDNSYSTLEGFNISSQGSNDFQGQLLESSYFEKIE | |
| | SNALRAFIKICPRNGLLYNAIYRNSKNYLNNIDLEDKKTTSKTNVSYPCSL | |
| | LNGCIEVENKDLFLISNKDSLNDINLSEEKIKPETTVFFKDKLPPQDITLSN | |
| | YDFTEANSIPSISQQNILERNEELYEPIRNSLFEIKTIYVDKLTTFHFLEAQN | |
| | IDESIDSSKIRVELTDSVDEALSNPNKVYSPFKNMSNTINSIETGITSTYIFY | |
| | QWLRSIVKDFSDETGKIDVIDKSSDTLAIVPYIGPLLNIGNDIRHGDFVGAI | |
| | ELAGITALLEYVPEFTIPILVGLEVIGGELAREQVEAIVNNALDKRDQKW | |
| | AEVYNITKAQWWGTIHLQINTRLAHTYKALSRQANAIKMNMEFQLANY | |
| | KGNIDDKAKIKNAISETEILLNKSVEQAMKNTEKFMIKLSNSYLTKEMIPK | |
| | VQDNLKNFDLETKKTLDKFIKEKEDILGTNLSSSLRRKVSIRLNKNIAFDI | |
| | NDIPFSEFDDLINQYKNEIEDYEVLNLGAEDGKIKDLSGTTSDINIGSDIEL | |
| | KYNCILNIKYEMDRDKLVDSSGYRSRINIGTGVKFSEIDKNQVQLSNLESS | |
| | KIEVILNNGVIYNSMYENFSTSFWIRIPKYFRNINNEYKIISCMQNNSGWE | |
| | VSLNFSNMNSKIIWTLQDTEGIKKTVVFQYTQNINISDYINRWIFVTITNN | |
| | RLSNSKIYINGRLINEESISDLGNIHASNNIMFKLDGCRDPHRYIWIKYFNL | |
| | FDKELNKKEIKDLYDNQSNSGILKDFWGDYLQYDKPYYMLNLYDPNKY | |
| | LDVNNVGIRGYMYLKGPRGRIVTTNIYLNSTLYMGTKFIIKKYASGNKD | |
| | NIVRNNDRVYINVVVKNKEYRLATNASQAGVEKILSAVEIPDVGNLSQV | |
| | VVMKSENDQGIRNKCKMNLQDNNGNDIGFIGFHQFNNIAKLVASNWYN | |
| | RQIGKASRTFGCSWEFIPVDDGWGESSL | |
| ^{ci}BoNT/EnA | MVTINDLHYSDPIDEDNIINMRIPLYDLEVDDQFINHNVPDLKAFQVFPNV | 13 |
| | WVVPERYTFYSTMKNLDAPANPSRSSYYDPTYLQSDAEKEVFLQQMILL | |
| | FKRINSTQEGQQFLNLLSRSIPVPYESNGDVAMGTTQVIKQMDDKGNVL | |
| | KHRRAHIIIYGPGPDLMAKGSKALTKSRETGRGCMAEIYFSPMYHKTYST | |
| | KLTNKNSLVDKSVQEFVPDPAVTLIHQLCHGLHALYGIDLGNVGSWEFN | |
| | SNPNSLFSSWFSSKEAVNFEEVMTFGGEDVKVIKSEIDKKIPGILNLIKTTV | |
| | EPIINKITDPHDEMLQCLQSKYPSLKGTLGQFFFDDTQLEKDIRDLWMVM | |
| | NETMFAENLKALTAARFLVPKVENIVQVDILSPNVYTIDKGFNHLSKGFK | |
| | GQSVSQSYFRKISALARGAVVRACPNPHFSSQRGLSSCIEILEDDLFIMSS | |
| | KDSFTDTDFSEPSVGPVSYKAKKGADTILDSTLSNYDFSKEINFTSTVPIIT | |
| | VEDPLETDEDVPVISEDRTVYVDDYTTFHFLEAQKIGKEVVPTQTKVVFT | |
| | TNMEEALFDSKKVYTVFENTASRINEAGTGIANGMMFYQWLKGIVQDFT | |
| | EEATQKDTFDKISDVTMIVPYLGNILNIGNDIRKGDFMGAVELGGVTILLE | |
| | AIPELTLPVLIGLTIIEDELEKEQVSQTVYNVLDKRDEKWEEVYGFVKQQ | |
| | WWWMVHTQFETRILHAYQALNHQVEAIKANMTYQLANYRGNQEDKEL | |
| | LEKAIDDTLQSLYYAVDQAMHNIKRFLIQSSKSYLLNQMLPKTKEQLLAF | |
| | DQQTLRNVNDFINKNQGVLGESLAKDLKKKVEKRLTSLPVFNLEDLPISE | |
| | FEDLIHSHEIDIQDSEVLNIGVNNGKIQDLSGENTPLTLGENLHIINTSILNL | |
| | RYESNHLIDLSRYASKINIGSKVNFDPIDKNQIQLFNLESSKIEVILKNAIVY | |
| | NSMYENFSTSFWIRIPKYFNSISLNNEYTIINCMENNSGWKVSLNYGEIIW | |
| | TLQDTQEIKQRVVFKYSQMINISDYINRWIFVTITNNRLNNSKIYINGRLID | |
| | QKPISNLGNIHASNNIMFKLDGCRDTHRYIWIKYFNLFDKELNEKEIKDL | |
| | YDNQSNSGILKDFWGDYLQYDKPYYMLNLYDPNKYVDVNNVGIRGYM | |
| | YLKGPRGSVMTTNIYLNSSLYRGTKFIIKKYASGNKDNIVRNNDRVYINV | |
| | VVKNKEYRLATNASQAGVEKILSALEIPDVGNLSQVVVMKSKNDQGITN | |
| | KCKMNLQDNNGNDIGFIGFHQFNNIAKLVASNWYNRQIERSSRTLGCSW | |
| | EFIPVDDGWGERPLQ | |
| ^{ci}BoNT/EnB | MVTINDLHYSDPIDEDNIINMRIPLYDLEVDDQFINHNVPDLKAFQVFPNV | 14 |
| | WVVPERYTFYSTMKNLDAPANPSRSSYYDPTYLQSDAEKEVFLQQMILL | |
| | FKRINSTQEGQQFLNLLSRSIPVPYESNGDVAMGTTQVIKQMDDKGNVL | |
| | KHRRAHIIIYGPGPDLMAKGSKALTKSRETGRGCMAEIYFSPMYHKTYST | |
| | KLTNKNSLVDKSVQEFVPDPAVTLIHQLCHGLHALYGIDLGNVGSWEFN | |
| | SNPNSLFSSWFSSKEAVNFEEVMTFGGEDVKVIKSEIDKKIPGILNLIKTTV | |
| | EPIINKITDPHDEMLQCLQSKYPSLKGTLGQFFFDDTQLEKDIRDLWMVM | |
| | NETMFAENLKALTAARFLVPKVENIVQVDILSPNVYTIDKGFNHLSKGFK | |
| | GQSVSQSYFRKISALARGAVVRACPNPHFSSQRGLSSCIEILEDDLFIMSS | |
| | KDSFTDTDFSEPSVGPVSYKAKKGADTILDSTLSNYDFSKEINFTSTVPIIT | |
| | VEDPLETDEDVPVISEDRTVYVDDYTTFHFLEAQKIGKEVVPTQTKVVFT | |
| | TNMEEALFDSKKVYTVFENTASRINEAGTGIANGMMFYQWLKGIVQDFT | |
| | EEATQKDTFDKISDVTMIVPYLGNILNIGNDIRKGDFMGAVELGGVTILLE | |
| | AIPELTLPVLIGLTIIEDELEKEQVSQTVYNVLDKRDEKWEEVYGFVKQQ | |
| | WWWMVHTQFETRILHAYQALNHQVEAIKANMTYQLANYRGNQEDKEL | |
| | LEKAIDDTLQSLYYAVDQAMHNIKRFLIQSSKSYLLNQMLPKTKEQLLAF | |
| | DQQTLRNVNDFINKNQGVLGESLAKDLKKKVEKRLTSLPVFNLEDLPISE | |
| | FEDLIHSHEIDIQDSEVLNIGVNNGKIQDLSGENTPLTLGENLHILNNIILNL | |
| | RYKDNNLIDLSGYGAKVEVYDGVELNDKNQFKLTSSANSKIRVTQNQNI | |
| | IFNSVFLDFSVSFWIRIPKYKNDGIQNYIHNEYTIINCMKNNSGWKISIRGN | |
| | RIIWTLIDINGKTKSVFFEYNIREDISEYINRWFFVTITNNLNNAKIYINGKL | |
| | ESNTDIKDIREVIANGEIIFKLDGDIDRTQFIWMKYFSIFNTELSQSNIEERY | |
| | KIQSYSEYLKDFWGNPLMYNKEYYMFNAGNKNSYIKLKKDSPVGEILTR | |
| | SKYNQNSKYINYRDLYIGEKFIIRRKSNSQSINDDIVRKEDYIYLDFFNLN | |
| | QEWRVYTYKYFKKEEEKLFLAPISDSDEFYNTIQIKEYDEQPTYSCQLLF | |
| | KKDEESTDEIGLIGIHRFYESGIVFEEYKDYFCISKWYLKEVKRKPYNLKL | |
| | GCNWQFIPKDEGWTE | |
| ^{ci}BoNT/EnC | MVTINDLHYSDPIDEDNIINMRIPLYDLEVDDQFINHNVPDLKAFQVFPNV | 15 |
| | WVVPERYTFYSTMKNLDAPANPSRSSYYDPTYLQSDAEKEVFLQQMILL | |
| | FKRINSTQEGQQFLNLLSRSIPVPYESNGDVAMGTTQVIKQMDDKGNVL | |
| | KHRRAHIIIYGPGPDLMAKGSKALTKSRETGRGCMAEIYFSPMYHKTYST | |
| | KLTNKNSLVDKSVQEFVPDPAVTLIHQLCHGLHALYGIDLGNVGSWEFN | |
| | SNPNSLFSSWFSSKEAVNFEEVMTFGGEDVKVIKSEIDKKIPGILNLIKTTV | |
| | EPIINKITDPHDEMLQCLQSKYPSLKGTLGQFFFDDTQLEKDIRDLWMVM | |
| | NETMFAENLKALTAARFLVPKVENIVQVDILSPNVYTIDKGFNHLSKGFK | |
| | GQSVSQSYFRKISALARGAVVRACPNPHFSSQRGLSSCIEILEDDLFIMSS | |
| | KDSFTDTDFSEPSVGPVSYKAKKGADTILDSTLSNYDFSKEINFTSTVPIIT | |
| | VEDPLETDEDVPVISEDRTVYVDDYTTFHFLEAQKIGKEVVPTQTKVVFT | |
| | TNMEEALFDSKKVYTVFENTASRINEAGTGIANGMMFYQWLKGIVQDFT | |
| | EEATQKDTFDKISDVTMIVPYLGNILNIGNDIRKGDFMGAVELGGVTILLE | |
| | AIPELTLPVLIGLTIIEDELEKEQVSQTVYNVLDKRDEKWEEVYGFVKQQ | |
| | WWWMVHTQFETRILHAYQALNHQVEAIKANMTYQLANYRGNQEDKEL | |
| | LEKAIDDTLQSLYYAVDQAMHNIKRFLIQSSKSYLLNQMLPKTKEQLLAF | |
| | DQQTLRNVNDFINKNQGVLGESLAKDLKKKVEKRLTSLPVFNLEDLPISE | |
| | FEDLIHSHEIDIQDSEVLNIGVNNGKIQDLSGENTPLTLGENLHINDSKILS | |
| | LQNRKNTLVDTSGYNAEVSEEGDVQLNPIFPFDFKLGSSGEDRGKVIVTQ | |
| | NENIVYNSMYESFSISFWIRINKWVSNLPGYTIIDSVKNNSGWSIGIISNFL | |
| | VFTLKQNEDSEQSINFSYDISNNAPGYNKWFFVTVTNNMMGNMKIYING | |
| | KLIDTIKVKELTGINFSKTITFEINKIPDTGLITSDSDNINMWIRDFYIFAKEL | |
| | DGKDINILFNSLQYTNVVKDYWGNDLRYNKEYYMVNIDYLNRYMYAN | |
| | SRQIVFNTRRNNNDFNEGYKIIIKRIRGNTNDTRVRGGDILYFDMTINNKA | |
| | YNLFMKNETMYADNHSTEDIYAIGLREQTKDINDNIIFQIQPMNNTYYYA | |
| | SQIFKSNFNGENISGICSIGTYRFRLGGDWYRHNYLVPTVKQGNYASLLE | |
| | STSTHWGFVPVSE | |
| ^{ci}BoNT/EnD | MVTINDLHYSDPIDEDNIINMRIPLYDLEVDDQFINHNVPDLKAFQVFPNV | 16 |
| | WVVPERYTFYSTMKNLDAPANPSRSSYYDPTYLQSDAEKEVFLQQMILL | |
| | FKRINSTQEGQQFLNLLSRSIPVPYESNGDVAMGTTQVIKQMDDKGNVL | |
| | KHRRAHIIIYGPGPDLMAKGSKALTKSRETGRGCMAEIYFSPMYHKTYST | |
| | KLTNKNSLVDKSVQEFVPDPAVTLIHQLCHGLHALYGIDLGNVGSWEFN | |
| | SNPNSLFSSWFSSKEAVNFEEVMTFGGEDVKVIKSEIDKKIPGILNLIKTTV | |
| | EPIINKITDPHDEMLQCLQSKYPSLKGTLGQFFFDDTQLEKDIRDLWMVM | |
| | NETMFAENLKALTAARFLVPKVENIVQVDILSPNVYTIDKGFNHLSKGFK | |
| | GQSVSQSYFRKISALARGAVVRACPNPHFSSQRGLSSCIEILEDDLFIMSS | |
| | KDSFTDTDFSEPSVGPVSYKAKKGADTILDSTLSNYDFSKEINFTSTVPIIT | |
| | VEDPLETDEDVPVISEDRTVYVDDYTTFHFLEAQKIGKEVVPTQTKVVFT | |
| | TNMEEALFDSKKVYTVFENTASRINEAGTGIANGMMFYQWLKGIVQDFT | |
| | EEATQKDTFDKISDVTMIVPYLGNILNIGNDIRKGDFMGAVELGGVTILLE | |
| | AIPELTLPVLIGLTIIEDELEKEQVSQTVYNVLDKRDEKWEEVYGFVKQQ | |
| | WWWMVHTQFETRILHAYQALNHQVEAIKANMTYQLANYRGNQEDKEL | |
| | LEKAIDDTLQSLYYAVDQAMHNIKRFLIQSSKSYLLNQMLPKTKEQLLAF | |
| | DQQTLRNVNDFINKNQGVLGESLAKDLKKKVEKRLTSLPVFNLEDLPISE | |
| | FEDLIHSHEIDIQDSEVLNIGVNNGKIQDLSGENTPLTLGENLHINDSKILS | |
| | LQNKKNALVDTSGYNAEVRVGDNVQLNTIYTNDFKLSSSGDKIIVNLNN | |
| | NILYSAIYENSSVSFWIKISKDLTNSHNEYTIINSIEQNSGWKLCIRNGNIE | |
| | WILQDVNRKYKSLIFDYSESLSHTGYTNKWFFVTITNNIMGYMKLYINGE | |
| | LKQSQKIEDLDEVKLDKTIVFGIDENIDENQMLWIRDFNIFSKELSNEDINI | |
| | VYEGQILRNVIKDYWGNPLKFDTEYYIINDNYIDRYIAPESNVLVLVQYP | |
| | DRSKLYTGNPITIKSVSDKNPYSRILNGDNIILHMLYNSRKYMIIRDTDTIY | |
| | ATQGGECSQNCVYALKLQSNLGNYGIGIFSIKNIVSKNKYCSQIFSSFREN | |
| | TMLLADIYKPWRFSFKNAYTPVAVTNYETKLLSTSSFWKFISRDPGWVE | |
| ^{ci}BoNT/EnE | MVTINDLHYSDPIDEDNIINMRIPLYDLEVDDQFINHNVPDLKAFQVFPNV | 17 |
| | WVVPERYTFYSTMKNLDAPANPSRSSYYDPTYLQSDAEKEVFLQQMILL | |
| | FKRINSTQEGQQFLNLLSRSIPVPYESNGDVAMGTTQVIKQMDDKGNVL | |
| | KHRRAHIIIYGPGPDLMAKGSKALTKSRETGRGCMAEIYFSPMYHKTYST | |
| | KLTNKNSLVDKSVQEFVPDPAVTLIHQLCHGLHALYGIDLGNVGSWEFN | |
| | SNPNSLFSSWFSSKEAVNFEEVMTFGGEDVKVIKSEIDKKIPGILNLIKTTV | |
| | EPIINKITDPHDEMLQCLQSKYPSLKGTLGQFFFDDTQLEKDIRDLWMVM | |
| | NETMFAENLKALTAARFLVPKVENIVQVDILSPNVYTIDKGFNHLSKGFK | |
| | GQSVSQSYFRKISALARGAVVRACPNPHFSSQRGLSSCIEILEDDLFIMSS | |
| | KDSFTDTDFSEPSVGPVSYKAKKGADTILDSTLSNYDFSKEINFTSTVPIIT | |
| | VEDPLETDEDVPVISEDRTVYVDDYTTFHFLEAQKIGKEVVPTQTKVVFT | |
| | TNMEEALFDSKKVYTVFENTASRINEAGTGIANGMMFYQWLKGIVQDFT | |
| | EEATQKDTFDKISDVTMIVPYLGNILNIGNDIRKGDFMGAVELGGVTILLE | |
| | AIPELTLPVLIGLTIIEDELEKEQVSQTVYNVLDKRDEKWEEVYGFVKQQ | |
| | WWWMVHTQFETRILHAYQALNHQVEAIKANMTYQLANYRGNQEDKEL | |
| | LEKAIDDTLQSLYYAVDQAMHNIKRFLIQSSKSYLLNQMLPKTKEQLLAF | |
| | DQQTLRNVNDFINKNQGVLGESLAKDLKKKVEKRLTSLPVFNLEDLPISE | |
| | FEDLIHSHEIDIQDSEVLNIGVNNGKIQDLSGENTPLTLGENLHIKSSSVLN | |
| | MRYKNDKYVDTSGYDSNININGDVYKYPTNKNQFGIYNDKLSEVNISQN | |
| | DYIIYDNKYKNFSISFWVRIPNYDNKIVNVNNEYTIINCMRDNNSGWKVS | |
| | LNHNEIIWTLQDNAGINQKLAFNYGNANGISDYINKWIFVTITNDRLGDS | |
| | KLYINGNLIDQKSILNLGNIHVSDNILFKIVNCSYTRYIGIRYFNIFDKELDE | |
| | TEIQTLYSNEPNTNILKDFWGNYLLYDKEYYLLNVLKPNNFIDRRKDSTL | |
| | SINNIRSTILLANRLYSGIKVKIQRVNNSSTNDNLVRKNDQVYINFVASKT | |
| | HLFPLYADTATTNKEKTIKISSSGNRFNQVVVMNSVGNNCTMNFKNNNG | |
| | NNIGLLGFKADTVVASTWYYTHMRDHTNSNGCFWNFISEEHGWQEK | |
| ^{ci}BoNT/EnF | MVTINDLHYSDPIDEDNIINMRIPLYDLEVDDQFINHNVPDLKAFQVFPNV | 18 |
| | WVVPERYTFYSTMKNLDAPANPSRSSYYDPTYLQSDAEKEVFLQQMILL | |
| | FKRINSTQEGQQFLNLLSRSIPVPYESNGDVAMGTTQVIKQMDDKGNVL | |
| | KHRRAHIIIYGPGPDLMAKGSKALTKSRETGRGCMAEIYFSPMYHKTYST | |
| | KLTNKNSLVDKSVQEFVPDPAVTLIHQLCHGLHALYGIDLGNVGSWEFN | |
| | SNPNSLFSSWFSSKEAVNFEEVMTFGGEDVKVIKSEIDKKIPGILNLIKTTV | |
| | EPIINKITDPHDEMLQCLQSKYPSLKGTLGQFFFDDTQLEKDIRDLWMVM | |
| | NETMFAENLKALTAARFLVPKVENIVQVDILSPNVYTIDKGFNHLSKGFK | |
| | GQSVSQSYFRKISALARGAVVRACPNPHFSSQRGLSSCIEILEDDLFIMSS | |
| | KDSFTDTDFSEPSVGPVSYKAKKGADTILDSTLSNYDFSKEINFTSTVPIIT | |
| | VEDPLETDEDVPVISEDRTVYVDDYTTFHFLEAQKIGKEVVPTQTKVVFT | |
| | TNMEEALFDSKKVYTVFENTASRINEAGTGIANGMMFYQWLKGIVQDFT | |
| | EEATQKDTFDKISDVTMIVPYLGNILNIGNDIRKGDFMGAVELGGVTILLE | |
| | AIPELTLPVLIGLTIIEDELEKEQVSQTVYNVLDKRDEKWEEVYGFVKQQ | |
| | WWWMVHTQFETRILHAYQALNHQVEAIKANMTYQLANYRGNQEDKEL | |
| | LEKAIDDTLQSLYYAVDQAMHNIKRFLIQSSKSYLLNQMLPKTKEQLLAF | |
| | DQQTLRNVNDFINKNQGVLGESLAKDLKKKVEKRLTSLPVFNLEDLPISE | |
| | FEDLIHSHEIDIQDSEVLNIGVNNGKIQDLSGENTPLTLGENLHIKDNSILD | |
| | MRYENNKFIDISGYGSNISINGDVYIYSTNRNQFGIYSSKPSEVNIAQNNDI | |
| | IYNGRYQNFSISFWVRIPKYFNKVNLNNEYTIIDCIRNNNSGWKISLNYNK | |
| | IIWTLQDTAGNNQKLVFNYTQMISISDYINKWIFVTITNNRLGNSRIYING | |
| | NLIDEKSISNLGDIHVSDNILFKIVGCNDTRYVGIRYFKVFDTELGKTEIET | |
| | LYSDEPDPSILKDFWGNYLLYNKRYYLLNLLRTDKSITQNSNFLNINQQR | |
| | GVYQKPNIFSNTRLYTGVEVIIRKNGSTDISNTDNFVRKNDLAYINVVDR | |
| | DVEYRLYADISIAKPEKIIKLIRTSNSNNSLGQIIVMDSIGNNCTMNFQNNN | |
| | GGNIGLLGFHSNNLVASSWYYNNIRKNTSSNGCFWSFISKEHGWQEN | |
| ^{ci}BoNT/EnG | MVTINDLHYSDPIDEDNIINMRIPLYDLEVDDQFINHNVPDLKAFQVFPNV | 19 |
| | WVVPERYTFYSTMKNLDAPANPSRSSYYDPTYLQSDAEKEVFLQQMILL | |
| | FKRINSTQEGQQFLNLLSRSIPVPYESNGDVAMGTTQVIKQMDDKGNVL | |
| | KHRRAHIIIYGPGPDLMAKGSKALTKSRETGRGCMAEIYFSPMYHKTYST | |
| | KLTNKNSLVDKSVQEFVPDPAVTLIHQLCHGLHALYGIDLGNVGSWEFN | |
| | SNPNSLFSSWFSSKEAVNFEEVMTFGGEDVKVIKSEIDKKIPGILNLIKTTV | |
| | EPIINKITDPHDEMLQCLQSKYPSLKGTLGQFFFDDTQLEKDIRDLWMVM | |
| | NETMFAENLKALTAARFLVPKVENIVQVDILSPNVYTIDKGFNHLSKGFK | |
| | GQSVSQSYFRKISALARGAVVRACPNPHFSSQRGLSSCIEILEDDLFIMSS | |
| | KDSFTDTDFSEPSVGPVSYKAKKGADTILDSTLSNYDFSKEINFTSTVPIIT | |
| | VEDPLETDEDVPVISEDRTVYVDDYTTFHFLEAQKIGKEVVPTQTKVVFT | |
| | TNMEEALFDSKKVYTVFENTASRINEAGTGIANGMMFYQWLKGIVQDFT | |
| | EEATQKDTFDKISDVTMIVPYLGNILNIGNDIRKGDFMGAVELGGVTILLE | |
| | AIPELTLPVLIGLTIIEDELEKEQVSQTVYNVLDKRDEKWEEVYGFVKQQ | |
| | WWWMVHTQFETRILHAYQALNHQVEAIKANMTYQLANYRGNQEDKEL | |
| | LEKAIDDTLQSLYYAVDQAMHNIKRFLIQSSKSYLLNQMLPKTKEQLLAF | |
| | DQQTLRNVNDFINKNQGVLGESLAKDLKKKVEKRLTSLPVFNLEDLPISE | |
| | FEDLIHSHEIDIQDSEVLNIGVNNGKIQDLSGENTPLTLGENLHISSNAILSL | |
| | SYRGGRLIDSSGYGATMNVGSDVIFNDIGNGQFKLNNSENSNITAHQSKF | |
| | VVYDSMFDNFSINFWVRTPKYNNNDIQTYLQNEYTIISCIKNDSGWKVSI | |
| | KGNRIIWTLIDVNAKSKSIFFEYSIKDNISDYINKWFSITITNDRLGNANIYI | |
| | NGSLKKSEKILNLDRINSSNDIDFKLINCTDTTKFVWIKDFNIFGRELNATE | |
| | VSSLYWIQSSTNTLKDFWGNPLRYDTQYYLFNQGMQNIYIKYFSKASMG | |
| | ETAPRTNFNNAAINYQNLYLGLRFIIKKASNSRNINNDNIVREGDYIYLNI | |
| | DNISDESYRVYVLVNSKEIQTQLFLAPINDDPTFYDVLQIKKYYEKTTYN | |
| | CQILCEKDTKTFGLFGIGKFVKDYGYVWDTYDNYFCISQWYLRRISENIN | |
| | KLRLGCNWQFIPVDEGWTE | |
| ^{ci}BoNT/EnH | MVTINDLHYSDPIDEDNIINMRIPLYDLEVDDQFINHNVPDLKAFQVFPNV | 20 |
| | WVVPERYTFYSTMKNLDAPANPSRSSYYDPTYLQSDAEKEVFLQQMILL | |
| | FKRINSTQEGQQFLNLLSRSIPVPYESNGDVAMGTTQVIKQMDDKGNVL | |
| | KHRRAHIIIYGPGPDLMAKGSKALTKSRETGRGCMAEIYFSPMYHKTYST | |
| | KLTNKNSLVDKSVQEFVPDPAVTLIHQLCHGLHALYGIDLGNVGSWEFN | |
| | SNPNSLFSSWFSSKEAVNFEEVMTFGGEDVKVIKSEIDKKIPGILNLIKTTV | |
| | EPIINKITDPHDEMLQCLQSKYPSLKGTLGQFFFDDTQLEKDIRDLWMVM | |
| | NETMFAENLKALTAARFLVPKVENIVQVDILSPNVYTIDKGFNHLSKGFK | |
| | GQSVSQSYFRKISALARGAVVRACPNPHFSSQRGLSSCIEILEDDLFIMSS | |
| | KDSFTDTDFSEPSVGPVSYKAKKGADTILDSTLSNYDFSKEINFTSTVPIIT | |
| | VEDPLETDEDVPVISEDRTVYVDDYTTFHFLEAQKIGKEVVPTQTKVVFT | |
| | TNMEEALFDSKKVYTVFENTASRINEAGTGIANGMMFYQWLKGIVQDFT | |
| | EEATQKDTFDKISDVTMIVPYLGNILNIGNDIRKGDFMGAVELGGVTILLE | |
| | AIPELTLPVLIGLTIIEDELEKEQVSQTVYNVLDKRDEKWEEVYGFVKQQ | |
| | WWWMVHTQFETRILHAYQALNHQVEAIKANMTYQLANYRGNQEDKEL | |
| | LEKAIDDTLQSLYYAVDQAMHNIKRFLIQSSKSYLLNQMLPKTKEQLLAF | |
| | DQQTLRNVNDFINKNQGVLGESLAKDLKKKVEKRLTSLPVFNLEDLPISE | |
| | FEDLIHSHEIDIQDSEVLNIGVNNGKIQDLSGENTPLTLGENLHLKYNCILN | |
| | IKYEMDRDKLVDSSGYRSRINIGTGVKFSEIDKNQVQLSNLESSKIEVILN | |
| | NGVIYNSMYENFSTSFWIRIPKYFRNINNEYKIISCMQNNSGWEVSLNFSN | |
| | MNSKIIWTLQDTEGIKKTVVFQYTQNINISDYINRWIFVTITNNRLSNSKIY | |
| | INGRLINEESISDLGNIHASNNIMFKLDGCRDPHRYIWIKYFNLFDKELNK | |
| | KEIKDLYDNQSNSGILKDFWGDYLQYDKPYYMLNLYDPNKYLDVNNVG | |
| | IRGYMYLKGPRGRIVTTNIYLNSTLYMGTKFIIKKYASGNKDNIVRNNDR | |
| | VYINVVVKNKEYRLATNASQAGVEKILSAVEIPDVGNLSQVVVMKSEND | |
| | QGIRNKCKMNLQDNNGNDIGFIGFHQFNNIAKLVASNWYNRQIGKASRT | |
| | FGCSWEFIPVDDGWGESSL | |
| ^{ci}BoNT/PMP1A | MLQIRVFNYNDPIDGENIVELRYHNRSPVKAFQIVDGIWIIPERYNFTNDT | 87 |
| | KKVPDDRALTILEDEVFAVRENDYLTTDVNEKNSFLNNITKLFKRINSSNI | |
| | GNQLLNYISTSVPYPVVSTNSIKARDYNTIKFDSIDGRRITKSANVLIYGPS | |
| | MKNLLDKQTRAINGEEAKNGIGCLSDIIFSPNYLSVQTVSSSRFVEDPASS | |
| | LTHQLIHALHNLYGIQYPGEEKFKFGGFIDKLLGTRECIDYEEVLTYGGK | |
| | DSEIIRKKIDKSLYPDDFVNKYGEMYKRIKGSNPYYPDEKKLKQSFLNRM | |
| | NPFDQNGTFDTKEFKNHLMDLWFGLNESEFAKEKKILVAKHFITKQINPK | |
| | YTELTNDVYTEDKGFVNGQSIDNQNFKIIDDLISKKVKLCSITSKNRVNICI | |
| | DVNKEDLYFISDKEGFENIDFSEPEIRYDSNVTTATTSSFTDHFLVNRTFN | |
| | DSDRFPPVELEYAIEPAEIVDNTIMPDIDQKSEISLDNLTTFHYLNAQKMD | |
| | LGFDSSKEQLKMVTSIEESLLDSKKVYTPFTRTAHSVNERISGIAESYLFY | |
| | QWLKTVINDFTDELNQKSNTDKVADISWIIPYVGPALNIGLDLSHGDFTK | |
| | AFEDLGVSILFAIAPEFATISLVALSIYENIEEDSQKEKVINKVENTLARRIE | |
| | KWHQVYAFMVAQWWGMVHTQIDTRIHQMYESLSHQIIAIKANMEYQLS | |
| | HYKGPDNDKLLLKDYIYEAEIALNTSANRAMKNIERFMIESSISYLKNNLI | |
| | PSVVENLKKFDADTKKNLDQFIDKNSSVLGSDLHILKSQVDLELNPTTKV | |
| | AFNIQSIPDFDINALIDRLGIQIINTSILNLRYESNHLIDLSRYASKINIGSKV | |
| | NFDPIDKNQIQLFNLESSKIEVILKNAIVYNSMYENFSTSFWIRIPKYFNSIS | |
| | LNNEYTIINCMENNSGWKVSLNYGEIIWTLQDTQEIKQRVVFKYSQMINI | |
| | SDYINRWIFVTITNNRLNNSKIYINGRLIDQKPISNLGNIHASNNIMFKLDG | |
| | CRDTHRYIWIKYFNLFDKELNEKEIKDLYDNQSNSGILKDFWGDYLQYD | |
| | KPYYMLNLYDPNKYVDVNNVGIRGYMYLKGPRGSVMTTNIYLNSSLYR | |
| | GTKFIIKKYASGNKDNIVRNNDRVYINVVVKNKEYRLATNASQAGVEKI | |
| | LSALEIPDVGNLSQVVVMKSKNDQGITNKCKMNLQDNNGNDIGFIGFHQ | |
| | FNNIAKLVASNWYNRQIERSSRTLGCSWEFIPVDDGWGERPLQ | |
| ^{ci}BoNT/PMP1B | MLQIRVFNYNDPIDGENIVELRYHNRSPVKAFQIVDGIWIIPERYNFTNDT | 88 |
| | KKVPDDRALTILEDEVFAVRENDYLTTDVNEKNSFLNNITKLFKRINSSNI | |
| | GNQLLNYISTSVPYPVVSTNSIKARDYNTIKFDSIDGRRITKSANVLIYGPS | |
| | MKNLLDKQTRAINGEEAKNGIGCLSDIIFSPNYLSVQTVSSSRFVEDPASS | |
| | LTHQLIHALHNLYGIQYPGEEKFKFGGFIDKLLGTRECIDYEEVLTYGGK | |
| | DSEIIRKKIDKSLYPDDFVNKYGEMYKRIKGSNPYYPDEKKLKQSFLNRM | |
| | NPFDQNGTFDTKEFKNHLMDLWFGLNESEFAKEKKILVAKHFITKQINPK | |
| | YTELTNDVYTEDKGFVNGQSIDNQNFKIIDDLISKKVKLCSITSKNRVNICI | |
| | DVNKEDLYFISDKEGFENIDFSEPEIRYDSNVTTATTSSFTDHFLVNRTFN | |
| | DSDRFPPVELEYAIEPAEIVDNTIMPDIDQKSEISLDNLTTFHYLNAQKMD | |
| | LGFDSSKEQLKMVTSIEESLLDSKKVYTPFTRTAHSVNERISGIAESYLFY | |
| | QWLKTVINDFTDELNQKSNTDKVADISWIIPYVGPALNIGLDLSHGDFTK | |
| | AFEDLGVSILFAIAPEFATISLVALSIYENIEEDSQKEKVINKVENTLARRIE | |
| | KWHQVYAFMVAQWWGMVHTQIDTRIHQMYESLSHQIIAIKANMEYQLS | |
| | HYKGPDNDKLLLKDYIYEAEIALNTSANRAMKNIERFMIESSISYLKNNLI | |
| | PSVVENLKKFDADTKKNLDQFIDKNSSVLGSDLHILKSQVDLELNPTTKV | |
| | AFNIQSIPDFDINALIDRLGIQILNNIILNLRYKDNNLIDLSGYGAKVEVYD | |
| | GVELNDKNQFKLTSSANSKIRVTQNQNIIFNSVFLDFSVSFWIRIPKYKND | |
| | GIQNYIHNEYTIINCMKNNSGWKISIRGNRIIWTLIDINGKTKSVFFEYNIR | |
| | EDISEYINRWFFVTITNNLNNAKIYINGKLESNTDIKDIREVIANGEIIFKLD | |
| | GDIDRTQFIWMKYFSIFNTELSQSNIEERYKIQSYSEYLKDFWGNPLMYN | |
| | KEYYMFNAGNKNSYIKLKKDSPVGEILTRSKYNQNSKYINYRDLYIGEKF | |
| | IIRRKSNSQSINDDIVRKEDYIYLDFFNLNQEWRVYTYKYFKKEEEKLFLA | |
| | PISDSDEFYNTIQIKEYDEQPTYSCQLLFKKDEESTDEIGLIGIHRFYESGIV | |
| | FEEYKDYFCISKWYLKEVKRKPYNLKLGCNWQFIPKDEGWTE | |
| ^{ci}BoNT/PMP1C | MLQIRVFNYNDPIDGENIVELRYHNRSPVKAFQIVDGIWIIPERYNFTNDT | 89 |
| | KKVPDDRALTILEDEVFAVRENDYLTTDVNEKNSFLNNITKLFKRINSSNI | |
| | GNQLLNYISTSVPYPVVSTNSIKARDYNTIKFDSIDGRRITKSANVLIYGPS | |
| | MKNLLDKQTRAINGEEAKNGIGCLSDIIFSPNYLSVQTVSSSRFVEDPASS | |
| | LTHQLIHALHNLYGIQYPGEEKFKFGGFIDKLLGTRECIDYEEVLTYGGK | |
| | DSEIIRKKIDKSLYPDDFVNKYGEMYKRIKGSNPYYPDEKKLKQSFLNRM | |
| | NPFDQNGTFDTKEFKNHLMDLWFGLNESEFAKEKKILVAKHFITKQINPK | |
| | YTELTNDVYTEDKGFVNGQSIDNQNFKIIDDLISKKVKLCSITSKNRVNICI | |
| | DVNKEDLYFISDKEGFENIDFSEPEIRYDSNVTTATTSSFTDHFLVNRTFN | |
| | DSDRFPPVELEYAIEPAEIVDNTIMPDIDQKSEISLDNLTTFHYLNAQKMD | |
| | LGFDSSKEQLKMVTSIEESLLDSKKVYTPFTRTAHSVNERISGIAESYLFY | |
| | QWLKTVINDFTDELNQKSNTDKVADISWIIPYVGPALNIGLDLSHGDFTK | |
| | AFEDLGVSILFAIAPEFATISLVALSIYENIEEDSQKEKVINKVENTLARRIE | |
| | KWHQVYAFMVAQWWGMVHTQIDTRIHQMYESLSHQIIAIKANMEYQLS | |
| | HYKGPDNDKLLLKDYIYEAEIALNTSANRAMKNIERFMIESSISYLKNNLI | |
| | PSVVENLKKFDADTKKNLDQFIDKNSSVLGSDLHILKSQVDLELNPTTKV | |
| | AFNIQSIPDFDINALIDRLGIQINDSKILSLQNRKNTLVDTSGYNAEVSEEG | |
| | DVQLNPIFPFDFKLGSSGEDRGKVIVTQNENIVYNSMYESFSISFWIRINK | |
| | WVSNLPGYTIIDSVKNNSGWSIGIISNFLVFTLKQNEDSEQSINFSYDISNN | |
| | APGYNKWFFVTVTNNMMGNMKIYINGKLIDTIKVKELTGINFSKTITFEI | |
| | NKIPDTGLITSDSDNINMWIRDFYIFAKELDGKDINILFNSLQYTNVVKDY | |
| | WGNDLRYNKEYYMVNIDYLNRYMYANSRQIVFNTRRNNNDFNEGYKIII | |
| | KRIRGNTNDTRVRGGDILYFDMTINNKAYNLFMKNETMYADNHSTEDIY | |
| | AIGLREQTKDINDNIIFQIQPMNNTYYYASQIFKSNFNGENISGICSIGTYRF | |
| | RLGGDWYRHNYLVPTVKQGNYASLLESTSTHWGFVPVSE | |
| ciBoNT/PMP1D | MLQIRVFNYNDPIDGENIVELRYHNRSPVKAFQIVDGIWIIPERYNFTNDT | 90 |
| | KKVPDDRALTILEDEVFAVRENDYLTTDVNEKNSFLNNITKLFKRINSSNI | |
| | GNQLLNYISTSVPYPVVSTNSIKARDYNTIKFDSIDGRRITKSANVLIYGPS | |
| | MKNLLDKQTRAINGEEAKNGIGCLSDIIFSPNYLSVQTVSSSRFVEDPASS | |
| | LTHQLIHALHNLYGIQYPGEEKFKFGGFIDKLLGTRECIDYEEVLTYGGK | |
| | DSEIIRKKIDKSLYPDDFVNKYGEMYKRIKGSNPYYPDEKKLKQSFLNRM | |
| | NPFDQNGTFDTKEFKNHLMDLWFGLNESEFAKEKKILVAKHFITKQINPK | |
| | YTELTNDVYTEDKGFVNGQSIDNQNFKIIDDLISKKVKLCSITSKNRVNICI | |
| | DVNKEDLYFISDKEGFENIDFSEPEIRYDSNVTTATTSSFTDHFLVNRTFN | |
| | DSDRFPPVELEYAIEPAEIVDNTIMPDIDQKSEISLDNLTTFHYLNAQKMD | |
| | LGFDSSKEQLKMVTSIEESLLDSKKVYTPFTRTAHSVNERISGIAESYLFY | |
| | QWLKTVINDFTDELNQKSNTDKVADISWIIPYVGPALNIGLDLSHGDFTK | |
| | AFEDLGVSILFAIAPEFATISLVALSIYENIEEDSQKEKVINKVENTLARRIE | |
| | KWHQVYAFMVAQWWGMVHTQIDTRIHQMYESLSHQIIAIKANMEYQLS | |
| | HYKGPDNDKLLLKDYIYEAEIALNTSANRAMKNIERFMIESSISYLKNNLI | |
| | PSVVENLKKFDADTKKNLDQFIDKNSSVLGSDLHILKSQVDLELNPTTKV | |
| | AFNIQSIPDFDINALIDRLGIQINDSKILSLQNKKNALVDTSGYNAEVRVG | |
| | DNVQLNTIYTNDFKLSSSGDKIIVNLNNNILYSAIYENSSVSFWIKISKDLT | |
| | NSHNEYTIINSIEQNSGWKLCIRNGNIEWILQDVNRKYKSLIFDYSESLSHT | |
| | GYTNKWFFVTITNNIMGYMKLYINGELKQSQKIEDLDEVKLDKTIVFGID | |
| | ENIDENQMLWIRDFNIFSKELSNEDINIVYEGQILRNVIKDYWGNPLKFDT | |
| | EYYIINDNYIDRYIAPESNVLVLVQYPDRSKLYTGNPITIKSVSDKNPYSRI | |
| | LNGDNIILHMLYNSRKYMIIRDTDTIYATQGGECSQNCVYALKLQSNLGN | |
| | YGIGIFSIKNIVSKNKYCSQIFSSFRENTMLLADIYKPWRFSFKNAYTPVA | |
| | VTNYETKLLSTSSFWKFISRDPGWVE | |
| ^{ci}BoNT/PMP1E | MLQIRVFNYNDPIDGENIVELRYHNRSPVKAFQIVDGIWIIPERYNFTNDT | 91 |
| | KKVPDDRALTILEDEVFAVRENDYLTTDVNEKNSFLNNITKLFKRINSSNI | |
| | GNQLLNYISTSVPYPVVSTNSIKARDYNTIKFDSIDGRRITKSANVLIYGPS | |
| | MKNLLDKQTRAINGEEAKNGIGCLSDIIFSPNYLSVQTVSSSRFVEDPASS | |
| | LTHQLIHALHNLYGIQYPGEEKFKFGGFIDKLLGTRECIDYEEVLTYGGK | |
| | DSEIIRKKIDKSLYPDDFVNKYGEMYKRIKGSNPYYPDEKKLKQSFLNRM | |
| | NPFDQNGTFDTKEFKNHLMDLWFGLNESEFAKEKKILVAKHFITKQINPK | |
| | YTELTNDVYTEDKGFVNGQSIDNQNFKIIDDLISKKVKLCSITSKNRVNICI | |
| | DVNKEDLYFISDKEGFENIDFSEPEIRYDSNVTTATTSSFTDHFLVNRTFN | |
| | DSDRFPPVELEYAIEPAEIVDNTIMPDIDQKSEISLDNLTTFHYLNAQKMD | |
| | LGFDSSKEQLKMVTSIEESLLDSKKVYTPFTRTAHSVNERISGIAESYLFY | |
| | QWLKTVINDFTDELNQKSNTDKVADISWIIPYVGPALNIGLDLSHGDFTK | |
| | AFEDLGVSILFAIAPEFATISLVALSIYENIEEDSQKEKVINKVENTLARRIE | |
| | KWHQVYAFMVAQWWGMVHTQIDTRIHQMYESLSHQIIAIKANMEYQLS | |
| | HYKGPDNDKLLLKDYIYEAEIALNTSANRAMKNIERFMIESSISYLKNNLI | |
| | PSVVENLKKFDADTKKNLDQFIDKNSSVLGSDLHILKSQVDLELNPTTKV | |
| | AFNIQSIPDFDINALIDRLGIQIKSSSVLNMRYKNDKYVDTSGYDSNINING | |
| | DVYKYPTNKNQFGIYNDKLSEVNISQNDYIIYDNKYKNFSISFWVRIPNY | |
| | DNKIVNVNNEYTIINCMRDNNSGWKVSLNHNEIIWTLQDNAGINQKLAF | |
| | NYGNANGISDYINKWIFVTITNDRLGDSKLYINGNLIDQKSILNLGNIHVS | |
| | DNILFKIVNCSYTRYIGIRYFNIFDKELDETEIQTLYSNEPNTNILKDFWGN | |
| | YLLYDKEYYLLNVLKPNNFIDRRKDSTLSINNIRSTILLANRLYSGIKVKIQ | |
| | RVNNSSTNDNLVRKNDQVYINFVASKTHLFPLYADTATTNKEKTIKISSS | |
| | GNRFNQVVVMNSVGNNCTMNFKNNNGNNIGLLGFKADTVVASTWYYT | |
| | HMRDHTNSNGCFWNFISEEHGWQEK | |
| ^{ci}BoNT/PMP1F | MLQIRVFNYNDPIDGENIVELRYHNRSPVKAFQIVDGIWIIPERYNFTNDT | 92 |
| | KKVPDDRALTILEDEVFAVRENDYLTTDVNEKNSFLNNITKLFKRINSSNI | |
| | GNQLLNYISTSVPYPVVSTNSIKARDYNTIKFDSIDGRRITKSANVLIYGPS | |
| | MKNLLDKQTRAINGEEAKNGIGCLSDIIFSPNYLSVQTVSSSRFVEDPASS | |
| | LTHQLIHALHNLYGIQYPGEEKFKFGGFIDKLLGTRECIDYEEVLTYGGK | |
| | DSEIIRKKIDKSLYPDDFVNKYGEMYKRIKGSNPYYPDEKKLKQSFLNRM | |
| | NPFDQNGTFDTKEFKNHLMDLWFGLNESEFAKEKKILVAKHFITKQINPK | |
| | YTELTNDVYTEDKGFVNGQSIDNQNFKIIDDLISKKVKLCSITSKNRVNICI | |
| | DVNKEDLYFISDKEGFENIDFSEPEIRYDSNVTTATTSSFTDHFLVNRTFN | |
| | DSDRFPPVELEYAIEPAEIVDNTIMPDIDQKSEISLDNLTTFHYLNAQKMD | |
| | LGFDSSKEQLKMVTSIEESLLDSKKVYTPFTRTAHSVNERISGIAESYLFY | |
| | QWLKTVINDFTDELNQKSNTDKVADISWIIPYVGPALNIGLDLSHGDFTK | |
| | AFEDLGVSILFAIAPEFATISLVALSIYENIEEDSQKEKVINKVENTLARRIE | |
| | KWHQVYAFMVAQWWGMVHTQIDTRIHQMYESLSHQIIAIKANMEYQLS | |
| | HYKGPDNDKLLLKDYIYEAEIALNTSANRAMKNIERFMIESSISYLKNNLI | |
| | PSVVENLKKFDADTKKNLDQFIDKNSSVLGSDLHILKSQVDLELNPTTKV | |
| | AFNIQSIPDFDINALIDRLGIQIKDNSILDMRYENNKFIDISGYGSNISINGD | |
| | VYIYSTNRNQFGIYSSKPSEVNIAQNNDIIYNGRYQNFSISFWVRIPKYFNK | |
| | VNLNNEYTIIDCIRNNNSGWKISLNYNKIIWTLQDTAGNNQKLVFNYTQ | |
| | MISISDYINKWIFVTITNNRLGNSRIYINGNLIDEKSISNLGDIHVSDNILFKI | |
| | VGCNDTRYVGIRYFKVFDTELGKTEIETLYSDEPDPSILKDFWGNYLLYN | |
| | KRYYLLNLLRTDKSITQNSNFLNINQQRGVYQKPNIFSNTRLYTGVEVIIR | |
| | KNGSTDISNTDNFVRKNDLAYINVVDRDVEYRLYADISIAKPEKIIKLIRT | |
| | SNSNNSLGQIIVMDSIGNNCTMNFQNNNGGNIGLLGFHSNNLVASSWYY | |
| | NNIRKNTSSNGCFWSFISKEHGWQEN | |
| ^{ci}BoNT/PMP1G | MLQIRVFNYNDPIDGENIVELRYHNRSPVKAFQIVDGIWIIPERYNFTNDT | 93 |
| | KKVPDDRALTILEDEVFAVRENDYLTTDVNEKNSFLNNITKLFKRINSSNI | |
| | GNQLLNYISTSVPYPVVSTNSIKARDYNTIKFDSIDGRRITKSANVLIYGPS | |
| | MKNLLDKQTRAINGEEAKNGIGCLSDIIFSPNYLSVQTVSSSRFVEDPASS | |
| | LTHQLIHALHNLYGIQYPGEEKFKFGGFIDKLLGTRECIDYEEVLTYGGK | |
| | DSEIIRKKIDKSLYPDDFVNKYGEMYKRIKGSNPYYPDEKKLKQSFLNRM | |
| | NPFDQNGTFDTKEFKNHLMDLWFGLNESEFAKEKKILVAKHFITKQINPK | |
| | YTELTNDVYTEDKGFVNGQSIDNQNFKIIDDLISKKVKLCSITSKNRVNICI | |
| | DVNKEDLYFISDKEGFENIDFSEPEIRYDSNVTTATTSSFTDHFLVNRTFN | |
| | DSDRFPPVELEYAIEPAEIVDNTIMPDIDQKSEISLDNLTTFHYLNAQKMD | |
| | LGFDSSKEQLKMVTSIEESLLDSKKVYTPFTRTAHSVNERISGIAESYLFY | |
| | QWLKTVINDFTDELNQKSNTDKVADISWIIPYVGPALNIGLDLSHGDFTK | |
| | AFEDLGVSILFAIAPEFATISLVALSIYENIEEDSQKEKVINKVENTLARRIE | |
| | KWHQVYAFMVAQWWGMVHTQIDTRIHQMYESLSHQIIAIKANMEYQLS | |
| | HYKGPDNDKLLLKDYIYEAEIALNTSANRAMKNIERFMIESSISYLKNNLI | |
| | PSVVENLKKFDADTKKNLDQFIDKNSSVLGSDLHILKSQVDLELNPTTKV | |
| | AFNIQSIPDFDINALIDRLGIQISSNAILSLSYRGGRLIDSSGYGATMNVGSD | |
| | VIFNDIGNGQFKLNNSENSNITAHQSKFVVYDSMFDNFSINFWVRTPKYN | |
| | NNDIQTYLQNEYTIISCIKNDSGWKVSIKGNRIIWTLIDVNAKSKSIFFEYSI | |
| | KDNISDYINKWFSITITNDRLGNANIYINGSLKKSEKILNLDRINSSNDIDF | |
| | KLINCTDTTKFVWIKDFNIFGRELNATEVSSLYWIQSSTNTLKDFWGNPL | |
| | RYDTQYYLFNQGMQNIYIKYFSKASMGETAPRTNFNNAAINYQNLYLGL | |
| | RFIIKKASNSRNINNDNIVREGDYIYLNIDNISDESYRVYVLVNSKEIQTQL | |
| | FLAPINDDPTFYDVLQIKKYYEKTTYNCQILCEKDTKTFGLFGIGKFVKD | |
| | YGYVWDTYDNYFCISQWYLRRISENINKLRLGCNWQFIPVDEGWTE | |
| ^{ci}BoNT/PMP1H | MLQIRVFNYNDPIDGENIVELRYHNRSPVKAFQIVDGIWIIPERYNFTNDT | 94 |
| | KKVPDDRALTILEDEVFAVRENDYLTTDVNEKNSFLNNITKLFKRINSSNI | |
| | GNQLLNYISTSVPYPVVSTNSIKARDYNTIKFDSIDGRRITKSANVLIYGPS | |
| | MKNLLDKQTRAINGEEAKNGIGCLSDIIFSPNYLSVQTVSSSRFVEDPASS | |
| | LTHQLIHALHNLYGIQYPGEEKFKFGGFIDKLLGTRECIDYEEVLTYGGK | |
| | DSEIIRKKIDKSLYPDDFVNKYGEMYKRIKGSNPYYPDEKKLKQSFLNRM | |
| | NPFDQNGTFDTKEFKNHLMDLWFGLNESEFAKEKKILVAKHFITKQINPK | |
| | YTELTNDVYTEDKGFVNGQSIDNQNFKIIDDLISKKVKLCSITSKNRVNICI | |
| | DVNKEDLYFISDKEGFENIDFSEPEIRYDSNVTTATTSSFTDHFLVNRTFN | |
| | DSDRFPPVELEYAIEPAEIVDNTIMPDIDQKSEISLDNLTTFHYLNAQKMD | |
| | LGFDSSKEQLKMVTSIEESLLDSKKVYTPFTRTAHSVNERISGIAESYLFY | |
| | QWLKTVINDFTDELNQKSNTDKVADISWIIPYVGPALNIGLDLSHGDFTK | |
| | AFEDLGVSILFAIAPEFATISLVALSIYENIEEDSQKEKVINKVENTLARRIE | |
| | KWHQVYAFMVAQWWGMVHTQIDTRIHQMYESLSHQIIAIKANMEYQLS | |
| | HYKGPDNDKLLLKDYIYEAEIALNTSANRAMKNIERFMIESSISYLKNNLI | |
| | PSVVENLKKFDADTKKNLDQFIDKNSSVLGSDLHILKSQVDLELNPTTKV | |
| | AFNIQSIPDFDINALIDRLGIQLKYNCILNIKYEMDRDKLVDSSGYRSRINI | |
| | GTGVKFSEIDKNQVQLSNLESSKIEVILNNGVIYNSMYENFSTSFWIRIPK | |
| | YFRNINNEYKIISCMQNNSGWEVSLNFSNMNSKIIWTLQDTEGIKKTVVF | |
| | QYTQNINISDYINRWIFVTITNNRLSNSKIYINGRLINEESISDLGNIHASNN | |
| | IMFKLDGCRDPHRYIWIKYFNLFDKELNKKEIKDLYDNQSNSGILKDFWG | |
| | DYLQYDKPYYMLNLYDPNKYLDVNNVGIRGYMYLKGPRGRIVTTNIYL | |
| | NSTLYMGTKFIIKKYASGNKDNIVRNNDRVYINVVVKNKEYRLATNASQ | |
| | AGVEKILSAVEIPDVGNLSQVVVMKSENDQGIRNKCKMNLQDNNGNDI | |
| | GFIGFHQFNNIAKLVASNWYNRQIGKASRTFGCSWEFIPVDDGWGESSL | |
| ^{ci}LC-Hn/X | MKLEINKFNYNDPIDGINVITMRPPRHSDKINKGKGPFKAFQVIKNIWIVP | 21 |
| w/ linker that | ERYNFTNNTNDLNIPSEPIMEADAIYNPNYLNTPSEKDEFLQGVIKVLERI | |
| contains thrombin | KSKPEGEKLLELISSSIPLPLVSNGALTLSDNETIAYQENNNIVSNLQANLV | |
| cleavage sites | IYGPGPDIANNATYGLYSTPISNGEGTLSEVSFSPFYLKPFDESYGNYRSL | |
| between LC and | VNIVNKFVKREFAPDPASTLMHQLVHVTHNLYGISNRNFYYNFDTGKIET | |
| Hn | SRQQNSLIFEELLTFGGIDSKAISSLIIKKIIETAKNNYTTLISERLNTVTVEN | |
| | DLLKYIKNKIPVQGRLGNFKLDTAEFEKKLNTILFVLNESNLAQRFSILVA | |
| | KHFLKERPIDPIYVNILDDNSYSTLEGFNISSQGSNDFQGQLLESSYFEKIE | |
| | SNALRAFIKICHKAIDGRSLGGSLVPRGSGGSAAAYNKTLDCIEVENKDL | |
| | FLISNKDSLNDINLSEEKIKPETTVFFKDKLPPQDITLSNYDFTEANSIPSIS | |
| | QQNILERNEELYEPIRNSLFEIKTIYVDKLTTFHFLEAQNIDESIDSSKIRVE | |
| | LTDSVDEALSNPNKVYSPFKNMSNTINSIETGITSTYIFYQWLRSIVKDFSD | |
| | ETGKIDVIDKSSDTLAIVPYIGPLLNIGNDIRHGDFVGAIELAGITALLEYV | |
| | PEFTIPILVGLEVIGGELAREQVEAIVNNALDKRDQKWAEVYNITKAQW | |
| | WGTIHLQINTRLAHTYKALSRQANAIKMNMEFQLANYKGNIDDKAKIKN | |
| | AISETEILLNKSVEQAMKNTEKFMIKLSNSYLTKEMIPKVQDNLKNFDLE | |
| | TKKTLDKFIKEKEDILGTNLSSSLRRKVSIRLNKNIAFDINDIPFSEFDDLIN | |
| | QYKNEIEDYEVLNLGAEDGKIKDLSGTTSDINIGSDIE | |
| ^{ci}LC-Hn/En | MVTINDLHYSDPIDEDNIINMRIPLYDLEVDDQFINHNVPDLKAFQVFPNV | 22 |
| w/ linker that | WVVPERYTFYSTMKNLDAPANPSRSSYYDPTYLQSDAEKEVFLQQMILL | |
| contains thrombin | FKRINSTQEGQQFLNLLSRSIPVPYESNGDVAMGTTQVIKQMDDKGNVL | |
| cleavage sites | KHRRAHIIIYGPGPDLMAKGSKALTKSRETGRGCMAEIYFSPMYHKTYST | |
| between LC and | KLTNKNSLVDKSVQEFVPDPAVTLIHQLCHGLHALYGIDLGNVGSWEFN | |
| Hn | SNPNSLFSSWFSSKEAVNFEEVMTFGGEDVKVIKSEIDKKIPGILNLIKTTV | |
| | EPIINKITDPHDEMLQCLQSKYPSLKGTLGQFFFDDTQLEKDIRDLWMVM | |
| | NETMFAENLKALTAARFLVPKVENIVQVDILSPNVYTIDKGFNHLSKGFK | |
| | GQSVSQSYFRKISALARGAVVRACHKAIDGRSLGGSLVPRGSGGSAAAY | |
| | NKTLDCIEILEDDLFIMSSKDSFTDTDFSEPSVGPVSYKAKKGADTILDSTL | |
| | SNYDFSKEINFTSTVPIITVEDPLETDEDVPVISEDRTVYVDDYTTFHFLEA | |
| | QKIGKEVVPTQTKVVFTTNMEEALFDSKKVYTVFENTASRINEAGTGIAN | |
| | GMMFYQWLKGIVQDFTEEATQKDTFDKISDVTMIVPYLGNILNIGNDIRK | |
| | GDFMGAVELGGVTILLEAIPELTLPVLIGLTIIEDELEKEQVSQTVYNVLD | |
| | KRDEKWEEVYGFVKQQWWWMVHTQFETRILHAYQALNHQVEAIKAN | |
| | MTYQLANYRGNQEDKELLEKAIDDTLQSLYYAVDQAMHNIKRFLIQSSK | |
| | SYLLNQMLPKTKEQLLAFDQQTLRNVNDFINKNQGVLGESLAKDLKKK | |
| | VEKRLTSLPVFNLEDLPISEFEDLIHSHEIDIQDSEVLNIGVNNGKIQDLSG | |
| | ENTPLTLGENLH | |
| ^{ci}LC-Hn/PMP1 | MLQIRVFNYNDPIDGENIVELRYHNRSPVKAFQIVDGIWIIPERYNFTNDT | 95 |
| w/ linker that | KKVPDDRALTILEDEVFAVRENDYLTTDVNEKNSFLNNITKLFKRINSSNI | |
| contains thrombin | GNQLLNYISTSVPYPVVSTNSIKARDYNTIKFDSIDGRRITKSANVLIYGPS | |
| cleavage sites | MKNLLDKQTRAINGEEAKNGIGCLSDIIFSPNYLSVQTVSSSRFVEDPASS | |
| between LC and | LTHQLIHALHNLYGIQYPGEEKFKFGGFIDKLLGTRECIDYEEVLTYGGK | |
| Hn | DSEIIRKKIDKSLYPDDFVNKYGEMYKRIKGSNPYYPDEKKLKQSFLNRM | |
| | NPFDQNGTFDTKEFKNHLMDLWFGLNESEFAKEKKILVAKHFITKQINPK | |
| | YTELTNDVYTEDKGFVNGQSIDNQNFKIIDDLISKKVKLCHKAIDGRSLG | |
| | GSLVPRGSGGSAAAYNKTLDCIDVNKEDLYFISDKEGFENIDFSEPEIRYD | |
| | SNVTTATTSSFTDHFLVNRTFNDSDRFPPVELEYAIEPAEIVDNTIMPDIDQ | |
| | KSEISLDNLTTFHYLNAQKMDLGFDSSKEQLKMVTSIEESLLDSKKVYTP | |
| | FTRTAHSVNERISGIAESYLFYQWLKTVINDFTDELNQKSNTDKVADISWI | |
| | IPYVGPALNIGLDLSHGDFTKAFEDLGVSILFAIAPEFATISLVALSIYENIE | |
| | EDSQKEKVINKVENTLARRIEKWHQVYAFMVAQWWGMVHTQIDTRIH | |
| | QMYESLSHQIIAIKANMEYQLSHYKGPDNDKLLLKDYIYEAEIALNTSAN | |
| | RAMKNIERFMIESSISYLKNNLIPSVVENLKKFDADTKKNLDQFIDKNSSV | |
| | LGSDLHILKSQVDLELNPTTKVAFNIQSIPDFDINALIDRLGIQ | |
| ^{ci}BoNT/XA | MKLEINKFNYNDPIDGINVITMRPPRHSDKINKGKGPFKAFQVIKNIWIVP | 23 |
| w/ linker that | ERYNFTNNTNDLNIPSEPIMEADAIYNPNYLNTPSEKDEFLQGVIKVLERI | |
| contains thrombin | KSKPEGEKLLELISSSIPLPLVSNGALTLSDNETIAYQENNNIVSNLQANLV | |
| cleavage sites | IYGPGPDIANNATYGLYSTPISNGEGTLSEVSFSPFYLKPFDESYGNYRSL | |
| between LC and | VNIVNKFVKREFAPDPASTLMHQLVHVTHNLYGISNRNFYYNFDTGKIET | |
| Hn | SRQQNSLIFEELLTFGGIDSKAISSLIIKKIIETAKNNYTTLISERLNTVTVEN | |
| | DLLKYIKNKIPVQGRLGNFKLDTAEFEKKLNTILFVLNESNLAQRFSILVA | |
| | KHFLKERPIDPIYVNILDDNSYSTLEGFNISSQGSNDFQGQLLESSYFEKIE | |
| | SNALRAFIKICHKAIDGRSLGGSLVPRGSGGSAAAYNKTLDCIEVENKDL | |
| | FLISNKDSLNDINLSEEKIKPETTVFFKDKLPPQDITLSNYDFTEANSIPSIS | |
| | QQNILERNEELYEPIRNSLFEIKTIYVDKLTTFHFLEAQNIDESIDSSKIRVE | |
| | LTDSVDEALSNPNKVYSPFKNMSNTINSIETGITSTYIFYQWLRSIVKDFSD | |
| | ETGKIDVIDKSSDTLAIVPYIGPLLNIGNDIRHGDFVGAIELAGITALLEYV | |
| | PEFTIPILVGLEVIGGELAREQVEAIVNNALDKRDQKWAEVYNITKAQW | |
| | WGTIHLQINTRLAHTYKALS RQANAIKMNMEFQLANYKGNIDDKAKIKN | |
| | AISETEILLNKSVEQAMKNTEKFMIKLSNSYLTKEMIPKVQDNLKNFDLE | |
| | TKKTLDKFIKEKEDILGTNLSSSLRRKVSIRLNKNIAFDINDIPFSEFDDLIN | |
| | QYKNEIEDYEVLNLGAEDGKIKDLSGTTSDINIGSDIEIINTSILNLRYESN | |
| | HLIDLSRYASKINIGSKVNFDPIDKNQIQLFNLESSKIEVILKNAIVYNSMY | |
| | ENFSTSFWIRIPKYFNSISLNNEYTIINCMENNSGWKVSLNYGEIIWTLQDT | |
| | QEIKQRVVFKYSQMINISDYINRWIFVTITNNRLNNSKIYINGRLIDQKPIS | |
| | NLGNIHASNNIMFKLDGCRDTHRYIWIKYFNLFDKELNEKEIKDLYDNQS | |
| | NSGILKDFWGDYLQYDKPYYMLNLYDPNKYVDVNNVGIRGYMYLKGP | |
| | RGSVMTTNIYLNSSLYRGTKFIIKKYASGNKDNIVRNNDRVYINVVVKN | |
| | KEYRLATNASQAGVEKILSALEIPDVGNLSQVVVMKSKNDQGITNKCKM | |
| | NLQDNNGNDIGFIGFHQFNNIAKLVASNWYNRQIERSSRTLGCSWEFIPV | |
| | DDGWGERPLQ | |
| ^{ci}BoNT/XB | MKLEINKFNYNDPIDGINVITMRPPRHSDKINKGKGPFKAFQVIKNIWIVP | 24 |
| w/ linker that | ERYNFTNNTNDLNIPSEPIMEADAIYNPNYLNTPSEKDEFLQGVIKVLERI | |
| contains thrombin | KSKPEGEKLLELISSSIPLPLVSNGALTLSDNETIAYQENNNIVSNLQANLV | |
| cleavage sites | IYGPGPDIANNATYGLYSTPISNGEGTLSEVSFSPFYLKPFDESYGNYRSL | |
| between LC and | VNIVNKFVKREFAPDPASTLMHQLVHVTHNLYGISNRNFYYNFDTGKIET | |
| Hn | SRQQNSLIFEELLTFGGIDSKAISSLIIKKIIETAKNNYTTLISERLNTVTVEN | |
| | DLLKYIKNKIPVQGRLGNFKLDTAEFEKKLNTILFVLNESNLAQRFSILVA | |
| | KHFLKERPIDPIYVNILDDNSYSTLEGFNISSQGSNDFQGQLLESSYFEKIE | |
| | SNALRAFIKICHKAIDGRSLGGSLVPRGSGGSAAAYNKTLDCIEVENKDL | |
| | FLISNKDSLNDINLSEEKIKPETTVFFKDKLPPQDITLSNYDFTEANSIPSIS | |
| | QQNILERNEELYEPIRNSLFEIKTIYVDKLTTFHFLEAQNIDESIDSSKIRVE | |
| | LTDSVDEALSNPNKVYSPFKNMSNTINSIETGITSTYIFYQWLRSIVKDFSD | |
| | ETGKIDVIDKSSDTLAIVPYIGPLLNIGNDIRHGDFVGAIELAGITALLEYV | |
| | PEFTIPILVGLEVIGGELAREQVEAIVNNALDKRDQKWAEVYNITKAQW | |
| | WGTIHLQINTRLAHTYKALSRQANAIKMNMEFQLANYKGNIDDKAKIKN | |
| | AISETEILLNKSVEQAMKNTEKFMIKLSNSYLTKEMIPKVQDNLKNFDLE | |
| | TKKTLDKFIKEKEDILGTNLSSSLRRKVSIRLNKNIAFDINDIPFSEFDDLIN | |
| | QYKNEIEDYEVLNLGAEDGKIKDLSGTTSDINIGSDIEILNNIILNLRYKDN | |
| | NLIDLSGYGAKVEVYDGVELNDKNQFKLTSSANSKIRVTQNQNIIFNSVF | |
| | LDFSVSFWIRIPKYKNDGIQNYIHNEYTIINCMKNNSGWKISIRGNRIIWTL | |
| | IDINGKTKSVFFEYNIREDISEYINRWFFVTITNNLNNAKIYINGKLESNTDI | |
| | KDIREVIANGEIIFKLDGDIDRTQFIWMKYFSIFNTELSQSNIEERYKIQSYS | |
| | EYLKDFWGNPLMYNKEYYMFNAGNKNSYIKLKKDSPVGEILTRSKYNQ | |
| | NSKYINYRDLYIGEKFIIRRKSNSQSINDDIVRKEDYIYLDFFNLNQEWRV | |
| | YTYKYFKKEEEKLFLAPISDSDEFYNTIQIKEYDEQPTYSCQLLFKKDEES | |
| | TDEIGLIGIHRFYESGIVFEEYKDYFCISKWYLKEVKRKPYNLKLGCNWQ | |
| | FIPKDEGWTE | |
| ^{ci}BoNT/XC | MKLEINKFNYNDPIDGINVITMRPPRHSDKINKGKGPFKAFQVIKNIWIVP | 25 |
| w/ linker that | ERYNFTNNTNDLNIPSEPIMEADAIYNPNYLNTPSEKDEFLQGVIKVLERI | |
| contains thrombin | KSKPEGEKLLELISSSIPLPLVSNGALTLSDNETIAYQENNNIVSNLQANLV | |
| cleavage sites | IYGPGPDIANNATYGLYSTPISNGEGTLSEVSFSPFYLKPFDESYGNYRSL | |
| between LC and | VNIVNKFVKREFAPDPASTLMHQLVHVTHNLYGISNRNFYYNFDTGKIET | |
| Hn | SRQQNSLIFEELLTFGGIDSKAISSLIIKKIIETAKNNYTTLISERLNTVTVEN | |
| | DLLKYIKNKIPVQGRLGNFKLDTAEFEKKLNTILFVLNESNLAQRFSILVA | |
| | KHFLKERPIDPIYVNILDDNSYSTLEGFNISSQGSNDFQGQLLESSYFEKIE | |
| | SNALRAFIKICHKAIDGRSLGGSLVPRGSGGSAAAYNKTLDCIEVENKDL | |
| | FLISNKDSLNDINLSEEKIKPETTVFFKDKLPPQDITLSNYDFTEANSIPSIS | |
| | QQNILERNEELYEPIRNSLFEIKTIYVDKLTTFHFLEAQNIDESIDSSKIRVE | |
| | LTDSVDEALSNPNKVYSPFKNMSNTINSIETGITSTYIFYQWLRSIVKDFSD | |
| | ETGKIDVIDKSSDTLAIVPYIGPLLNIGNDIRHGDFVGAIELAGITALLEYV | |
| | PEFTIPILVGLEVIGGELAREQVEAIVNNALDKRDQKWAEVYNITKAQW | |
| | WGTIHLQINTRLAHTYKALSRQANAIKMNMEFQLANYKGNIDDKAKIKN | |
| | AISETEILLNKSVEQAMKNTEKFMIKLSNSYLTKEMIPKVQDNLKNFDLE | |
| | TKKTLDKFIKEKEDILGTNLSSSLRRKVSIRLNKNIAFDINDIPFSEFDDLIN | |
| | QYKNEIEDYEVLNLGAEDGKIKDLSGTTSDINIGSDIEINDSKILSLQNRKN | |
| | TLVDTSGYNAEVSEEGDVQLNPIFPFDFKLGSSGEDRGKVIVTQNENIVY | |
| | NSMYESFSISFWIRINKWVSNLPGYTIIDSVKNNSGWSIGIISNFLVFTLKQ | |
| | NEDSEQSINFSYDISNNAPGYNKWFFVTVTNNMMGNMKIYINGKLIDTIK | |
| | VKELTGINFSKTITFEINKIPDTGLITSDSDNINMWIRDFYIFAKELDGKDIN | |
| | ILFNSLQYTNVVKDYWGNDLRYNKEYYMVNIDYLNRYMYANSRQIVFN | |
| | TRRNNNDFNEGYKIIIKRIRGNTNDTRVRGGDILYFDMTINNKAYNLFMK | |
| | NETMYADNHSTEDIYAIGLREQTKDINDNIIFQIQPMNNTYYYASQIFKSN | |
| | FNGENISGICSIGTYRFRLGGDWYRHNYLVPTVKQGNYASLLESTSTHW | |
| | GFVPVSE | |
| ^{ci}BoNT/XD | MKLEINKFNYNDPIDGINVITMRPPRHSDKINKGKGPFKAFQVIKNIWIVP | 26 |
| w/ linker that | ERYNFTNNTNDLNIPSEPIMEADAIYNPNYLNTPSEKDEFLQGVIKVLERI | |
| contains thrombin | KSKPEGEKLLELISSSIPLPLVSNGALTLSDNETIAYQENNNIVSNLQANLV | |
| cleavage sites | IYGPGPDIANNATYGLYSTPISNGEGTLSEVSFSPFYLKPFDESYGNYRSL | |
| between LC and | VNIVNKFVKREFAPDPASTLMHQLVHVTHNLYGISNRNFYYNFDTGKIET | |
| Hn | SRQQNSLIFEELLTFGGIDSKAISSLIIKKIIETAKNNYTTLISERLNTVTVEN | |
| | DLLKYIKNKIPVQGRLGNFKLDTAEFEKKLNTILFVLNESNLAQRFSILVA | |
| | KHFLKERPIDPIYVNILDDNSYSTLEGFNISSQGSNDFQGQLLESSYFEKIE | |
| | SNALRAFIKICHKAIDGRSLGGSLVPRGSGGSAAAYNKTLDCIEVENKDL | |
| | FLISNKDSLNDINLSEEKIKPETTVFFKDKLPPQDITLSNYDFTEANSIPSIS | |
| | QQNILERNEELYEPIRNSLFEIKTIYVDKLTTFHFLEAQNIDESIDSSKIRVE | |
| | LTDSVDEALSNPNKVYSPFKNMSNTINSIETGITSTYIFYQWLRSIVKDFSD | |
| | ETGKIDVIDKSSDTLAIVPYIGPLLNIGNDIRHGDFVGAIELAGITALLEYV | |
| | PEFTIPILVGLEVIGGELAREQVEAIVNNALDKRDQKWAEVYNITKAQW | |
| | WGTIHLQINTRLAHTYKALSRQANAIKMNMEFQLANYKGNIDDKAKIKN | |
| | AISETEILLNKSVEQAMKNTEKFMIKLSNSYLTKEMIPKVQDNLKNFDLE | |
| | TKKTLDKFIKEKEDILGTNLSSSLRRKVSIRLNKNIAFDINDIPFSEFDDLIN | |
| | QYKNEIEDYEVLNLGAEDGKIKDLSGTTSDINIGSDIEINDSKILSLQNKKN | |
| | ALVDTSGYNAEVRVGDNVQLNTIYTNDFKLSSSGDKIIVNLNNNILYSAI | |
| | YENSSVSFWIKISKDLTNSHNEYTIINSIEQNSGWKLCIRNGNIEWILQDVN | |
| | RKYKSLIFDYSESLSHTGYTNKWFFVTITNNIMGYMKLYINGELKQSQKI | |
| | EDLDEVKLDKTIVFGIDENIDENQMLWIRDFNIFSKELSNEDINIVYEGQIL | |
| | RNVIKDYWGNPLKFDTEYYIINDNYIDRYIAPESNVLVLVQYPDRSKLYT | |
| | GNPITIKSVSDKNPYSRILNGDNIILHMLYNSRKYMIIRDTDTIYATQGGEC | |
| | SQNCVYALKLQSNLGNYGIGIFSIKNIVSKNKYCSQIFSSFRENTMLLADI | |
| | YKPWRFSFKNAYTPVAVTNYETKLLSTSSFWKFISRDPGWVE | |
| ^{ci}BoNT/XE | MKLEINKFNYNDPIDGINVITMRPPRHSDKINKGKGPFKAFQVIKNIWIVP | 27 |
| w/ linker that | ERYNFTNNTNDLNIPSEPIMEADAIYNPNYLNTPSEKDEFLQGVIKVLERI | |
| contains thrombin | KSKPEGEKLLELISSSIPLPLVSNGALTLSDNETIAYQENNNIVSNLQANLV | |
| cleavage sites | IYGPGPDIANNATYGLYSTPISNGEGTLSEVSFSPFYLKPFDESYGNYRSL | |
| between LC and | VNIVNKFVKREFAPDPASTLMHQLVHVTHNLYGISNRNFYYNFDTGKIET | |
| Hn | SRQQNSLIFEELLTFGGIDSKAISSLIIKKIIETAKNNYTTLISERLNTVTVEN | |
| | DLLKYIKNKIPVQGRLGNFKLDTAEFEKKLNTILFVLNESNLAQRFSILVA | |
| | KHFLKERPIDPIYVNILDDNSYSTLEGFNISSQGSNDFQGQLLESSYFEKIE | |
| | SNALRAFIKICHKAIDGRSLGGSLVPRGSGGSAAAYNKTLDCIEVENKDL | |
| | FLISNKDSLNDINLSEEKIKPETTVFFKDKLPPQDITLSNYDFTEANSIPSIS | |
| | QQNILERNEELYEPIRNSLFEIKTIYVDKLTTFHFLEAQNIDESIDSSKIRVE | |
| | LTDSVDEALSNPNKVYSPFKNMSNTINSIETGITSTYIFYQWLRSIVKDFSD | |
| | ETGKIDVIDKSSDTLAIVPYIGPLLNIGNDIRHGDFVGAIELAGITALLEYV | |
| | PEFTIPILVGLEVIGGELAREQVEAIVNNALDKRDQKWAEVYNITKAQW | |
| | WGTIHLQINTRLAHTYKALSRQANAIKMNMEFQLANYKGNIDDKAKIKN | |
| | AISETEILLNKSVEQAMKNTEKFMIKLSNSYLTKEMIPKVQDNLKNFDLE | |
| | TKKTLDKFIKEKEDILGTNLSSSLRRKVSIRLNKNIAFDINDIPFSEFDDLIN | |
| | QYKNEIEDYEVLNLGAEDGKIKDLSGTTSDINIGSDIEIKSSSVLNMRYKN | |
| | DKYVDTSGYDSNININGDVYKYPTNKNQFGIYNDKLSEVNISQNDYIIYD | |
| | NKYKNFSISFWVRIPNYDNKIVNVNNEYTIINCMRDNNSGWKVSLNHNEI | |
| | IWTLQDNAGINQKLAFNYGNANGISDYINKWIFVTITNDRLGDSKLYING | |
| | NLIDQKSILNLGNIHVSDNILFKIVNCSYTRYIGIRYFNIFDKELDETEIQTL | |
| | YSNEPNTNILKDFWGNYLLYDKEYYLLNVLKPNNFIDRRKDSTLSINNIR | |
| | STILLANRLYSGIKVKIQRVNNSSTNDNLVRKNDQVYINFVASKTHLFPL | |
| | YADTATTNKEKTIKISSSGNRFNQVVVMNSVGNNCTMNFKNNNGNNIGL | |
| | LGFKADTVVASTWYYTHMRDHTNSNGCFWNFISEEHGWQEK | |
| ^{ci}BoNT/XF | MKLEINKFNYNDPIDGINVITMRPPRHSDKINKGKGPFKAFQVIKNIWIVP | 28 |
| w/ linker that | ERYNFTNNTNDLNIPSEPIMEADAIYNPNYLNTPSEKDEFLQGVIKVLERI | |
| contains thrombin | KSKPEGEKLLELISSSIPLPLVSNGALTLSDNETIAYQENNNIVSNLQANLV | |
| cleavage sites | IYGPGPDIANNATYGLYSTPISNGEGTLSEVSFSPFYLKPFDESYGNYRSL | |
| between LC and | VNIVNKFVKREFAPDPASTLMHQLVHVTHNLYGISNRNFYYNFDTGKIET | |
| Hn | SRQQNSLIFEELLTFGGIDSKAISSLIIKKIIETAKNNYTTLISERLNTVTVEN | |
| | DLLKYIKNKIPVQGRLGNFKLDTAEFEKKLNTILFVLNESNLAQRFSILVA | |
| | KHFLKERPIDPIYVNILDDNSYSTLEGFNISSQGSNDFQGQLLESSYFEKIE | |
| | SNALRAFIKICHKAIDGRSLGGSLVPRGSGGSAAAYNKTLDCIEVENKDL | |
| | FLISNKDSLNDINLSEEKIKPETTVFFKDKLPPQDITLSNYDFTEANSIPSIS | |
| | QQNILERNEELYEPIRNSLFEIKTIYVDKLTTFHFLEAQNIDESIDSSKIRVE | |
| | LTDSVDEALSNPNKVYSPFKNMSNTINSIETGITSTYIFYQWLRSIVKDFSD | |
| | ETGKIDVIDKSSDTLAIVPYIGPLLNIGNDIRHGDFVGAIELAGITALLEYV | |
| | PEFTIPILVGLEVIGGELAREQVEAIVNNALDKRDQKWAEVYNITKAQW | |
| | WGTIHLQINTRLAHTYKALSRQANAIKMNMEFQLANYKGNIDDKAKIKN | |
| | AISETEILLNKSVEQAMKNTEKFMIKLSNSYLTKEMIPKVQDNLKNFDLE | |
| | TKKTLDKFIKEKEDILGTNLSSSLRRKVSIRLNKNIAFDINDIPFSEFDDLIN | |
| | QYKNEIEDYEVLNLGAEDGKIKDLSGTTSDINIGSDIEIKDNSILDMRYEN | |
| | NKFIDISGYGSNISINGDVYIYSTNRNQFGIYSSKPSEVNIAQNNDIIYNGR | |
| | YQNFSISFWVRIPKYFNKVNLNNEYTIIDCIRNNNSGWKISLNYNKIIWTL | |
| | QDTAGNNQKLVFNYTQMISISDYINKWIFVTITNNRLGNSRIYINGNLIDE | |
| | KSISNLGDIHVSDNILFKIVGCNDTRYVGIRYFKVFDTELGKTEIETLYSDE | |
| | PDPSILKDFWGNYLLYNKRYYLLNLLRTDKSITQNSNFLNINQQRGVYQ | |
| | KPNIFSNTRLYTGVEVIIRKNGSTDISNTDNFVRKNDLAYINVVDRDVEY | |
| | RLYADISIAKPEKIIKLIRTSNSNNSLGQIIVMDSIGNNCTMNFQNNNGGNI | |
| | GLLGFHSNNLVASSWYYNNIRKNTSSNGCFWSFISKEHGWQEN | |
| ^{ci}BoNT/XG | MKLEINKFNYNDPIDGINVITMRPPRHSDKINKGKGPFKAFQVIKNIWIVP | 29 |
| w/ linker that | ERYNFTNNTNDLNIPSEPIMEADAIYNPNYLNTPSEKDEFLQGVIKVLERI | |
| contains thrombin | KSKPEGEKLLELISSSIPLPLVSNGALTLSDNETIAYQENNNIVSNLQANLV | |
| cleavage sites | IYGPGPDIANNATYGLYSTPISNGEGTLSEVSFSPFYLKPFDESYGNYRSL | |
| between LC and | VNIVNKFVKREFAPDPASTLMHQLVHVTHNLYGISNRNFYYNFDTGKIET | |
| Hn | SRQQNSLIFEELLTFGGIDSKAISSLIIKKIIETAKNNYTTLISERLNTVTVEN | |
| | DLLKYIKNKIPVQGRLGNFKLDTAEFEKKLNTILFVLNESNLAQRFSILVA | |
| | KHFLKERPIDPIYVNILDDNSYSTLEGFNISSQGSNDFQGQLLESSYFEKIE | |
| | SNALRAFIKICHKAIDGRSLGGSLVPRGSGGSAAAYNKTLDCIEVENKDL | |
| | FLISNKDSLNDINLSEEKIKPETTVFFKDKLPPQDITLSNYDFTEANSIPSIS | |
| | QQNILERNEELYEPIRNSLFEIKTIYVDKLTTFHFLEAQNIDESIDSSKIRVE | |
| | LTDSVDEALSNPNKVYSPFKNMSNTINSIETGITSTYIFYQWLRSIVKDFSD | |
| | ETGKIDVIDKSSDTLAIVPYIGPLLNIGNDIRHGDFVGAIELAGITALLEYV | |
| | PEFTIPILVGLEVIGGELAREQVEAIVNNALDKRDQKWAEVYNITKAQW | |
| | WGTIHLQINTRLAHTYKALSRQANAIKMNMEFQLANYKGNIDDKAKIKN | |
| | AISETEILLNKSVEQAMKNTEKFMIKLSNSYLTKEMIPKVQDNLKNFDLE | |
| | TKKTLDKFIKEKEDILGTNLSSSLRRKVSIRLNKNIAFDINDIPFSEFDDLIN | |
| | QYKNEIEDYEVLNLGAEDGKIKDLSGTTSDINIGSDIEISSNAILSLSYRGG | |
| | RLIDSSGYGATMNVGSDVIFNDIGNGQFKLNNSENSNITAHQSKFVVYDS | |
| | MFDNFSINFWVRTPKYNNNDIQTYLQNEYTIISCIKNDSGWKVSIKGNRII | |
| | WTLIDVNAKSKSIFFEYSIKDNISDYINKWFSITITNDRLGNANIYINGSLK | |
| | KSEKILNLDRINSSNDIDFKLINCTDTTKFVWIKDFNIFGRELNATEVSSLY | |
| | WIQSSTNTLKDFWGNPLRYDTQYYLFNQGMQNIYIKYFSKASMGETAPR | |
| | TNFNNAAINYQNLYLGLRFIIKKASNSRNINNDNIVREGDYIYLNIDNISDE | |
| | SYRVYVLVNSKEIQTQLFLAPINDDPTFYDVLQIKKYYEKTTYNCQILCE | |
| | KDTKTFGLFGIGKFVKDYGYVWDTYDNYFCISQWYLRRISENINKLRLG | |
| | CNWQFIPVDEGWTE | |
| ^{ci}BoNT/XH | MKLEINKFNYNDPIDGINVITMRPPRHSDKINKGKGPFKAFQVIKNIWIVP | 30 |
| w/ linker that | ERYNFTNNTNDLNIPSEPIMEADAIYNPNYLNTPSEKDEFLQGVIKVLERI | |
| contains thrombin | KSKPEGEKLLELISSSIPLPLVSNGALTLSDNETIAYQENNNIVSNLQANLV | |
| cleavage sites | IYGPGPDIANNATYGLYSTPISNGEGTLSEVSFSPFYLKPFDESYGNYRSL | |
| between LC and | VNIVNKFVKREFAPDPASTLMHQLVHVTHNLYGISNRNFYYNFDTGKIET | |
| Hn | SRQQNSLIFEELLTFGGIDSKAISSLIIKKIIETAKNNYTTLISERLNTVTVEN | |
| | DLLKYIKNKIPVQGRLGNFKLDTAEFEKKLNTILFVLNESNLAQRFSILVA | |
| | KHFLKERPIDPIYVNILDDNSYSTLEGFNISSQGSNDFQGQLLESSYFEKIE | |
| | SNALRAFIKICHKAIDGRSLGGSLVPRGSGGSAAAYNKTLDCIEVENKDL | |
| | FLISNKDSLNDINLSEEKIKPETTVFFKDKLPPQDITLSNYDFTEANSIPSIS | |
| | QQNILERNEELYEPIRNSLFEIKTIYVDKLTTFHFLEAQNIDESIDSSKIRVE | |
| | LTDSVDEALSNPNKVYSPFKNMSNTINSIETGITSTYIFYQWLRSIVKDFSD | |
| | ETGKIDVIDKSSDTLAIVPYIGPLLNIGNDIRHGDFVGAIELAGITALLEYV | |
| | PEFTIPILVGLEVIGGELAREQVEAIVNNALDKRDQKWAEVYNITKAQW | |
| | WGTIHLQINTRLAHTYKALSRQANAIKMNMEFQLANYKGNIDDKAKIKN | |
| | AISETEILLNKSVEQAMKNTEKFMIKLSNSYLTKEMIPKVQDNLKNFDLE | |
| | TKKTLDKFIKEKEDILGTNLSSSLRRKVSIRLNKNIAFDINDIPFSEFDDLIN | |
| | QYKNEIEDYEVLNLGAEDGKIKDLSGTTSDINIGSDIELKYNCILNIKYEM | |
| | DRDKLVDSSGYRSRINIGTGVKFSEIDKNQVQLSNLESSKIEVILNNGVIY | |
| | NSMYENFSTSFWIRIPKYFRNINNEYKIISCMQNNSGWEVSLNFSNMNSKI | |
| | IWTLQDTEGIKKTVVFQYTQNINISDYINRWIFVTITNNRLSNSKIYINGRL | |
| | INEESISDLGNIHASNNIMFKLDGCRDPHRYIWIKYFNLFDKELNKKEIKD | |
| | LYDNQSNSGILKDFWGDYLQYDKPYYMLNLYDPNKYLDVNNVGIRGY | |
| | MYLKGPRGRIVTTNIYLNSTLYMGTKFIIKKYASGNKDNIVRNNDRVYIN | |
| | VVVKNKEYRLATNASQAGVEKILSAVEIPDVGNLSQVVVMKSENDQGIR | |
| | NKCKMNLQDNNGNDIGFIGFHQFNNIAKLVASNWYNRQIGKASRTFGCS | |
| | WEFIPVDDGWGESSL | |
| ^{ci}BoNT/EnA | MVTINDLHYSDPIDEDNIINMRIPLYDLEVDDQFINHNVPDLKAFQVFPNV | 31 |
| w/ linker that | WVVPERYTFYSTMKNLDAPANPSRSSYYDPTYLQSDAEKEVFLQQMILL | |
| contains thrombin | FKRINSTQEGQQFLNLLSRSIPVPYESNGDVAMGTTQVIKQMDDKGNVL | |
| cleavage sites | KHRRAHIIIYGPGPDLMAKGSKALTKSRETGRGCMAEIYFSPMYHKTYST | |
| between LC and | KLTNKNSLVDKSVQEFVPDPAVTLIHQLCHGLHALYGIDLGNVGSWEFN | |
| Hn | SNPNSLFSSWFSSKEAVNFEEVMTFGGEDVKVIKSEIDKKIPGILNLIKTTV | |
| | EPIINKITDPHDEMLQCLQSKYPSLKGTLGQFFFDDTQLEKDIRDLWMVM | |
| | NETMFAENLKALTAARFLVPKVENIVQVDILSPNVYTIDKGFNHLSKGFK | |
| | GQSVSQSYFRKISALARGAVVRACHKAIDGRSLGGSLVPRGSGGSAAAY | |
| | NKTLDCIEILEDDLFIMSSKDSFTDTDFSEPSVGPVSYKAKKGADTILDSTL | |
| | SNYDFSKEINFTSTVPIITVEDPLETDEDVPVISEDRTVYVDDYTTFHFLEA | |
| | QKIGKEVVPTQTKVVFTTNMEEALFDSKKVYTVFENTASRINEAGTGIAN | |
| | GMMFYQWLKGIVQDFTEEATQKDTFDKISDVTMIVPYLGNILNIGNDIRK | |
| | GDFMGAVELGGVTILLEAIPELTLPVLIGLTIIEDELEKEQVSQTVYNVLD | |
| | KRDEKWEEVYGFVKQQWWWMVHTQFETRILHAYQALNHQVEAIKAN | |
| | MTYQLANYRGNQEDKELLEKAIDDTLQSLYYAVDQAMHNIKRFLIQSSK | |
| | SYLLNQMLPKTKEQLLAFDQQTLRNVNDFINKNQGVLGESLAKDLKKK | |
| | VEKRLTSLPVFNLEDLPISEFEDLIHSHEIDIQDSEVLNIGVNNGKIQDLSG | |
| | ENTPLTLGENLHIINTSILNLRYESNHLIDLSRYASKINIGSKVNFDPIDKNQ | |
| | IQLFNLESSKIEVILKNAIVYNSMYENFSTSFWIRIPKYFNSISLNNEYTIINC | |
| | MENNSGWKVSLNYGEIIWTLQDTQEIKQRVVFKYSQMINISDYINRWIFV | |
| | TITNNRLNNSKIYINGRLIDQKPISNLGNIHASNNIMFKLDGCRDTHRYIWI | |
| | KYFNLFDKELNEKEIKDLYDNQSNSGILKDFWGDYLQYDKPYYMLNLY | |
| | DPNKYVDVNNVGIRGYMYLKGPRGSVMTTNIYLNSSLYRGTKFIIKKYA | |
| | SGNKDNIVRNNDRVYINVVVKNKEYRLATNASQAGVEKILSALEIPDVG | |
| | NLSQVVVMKSKNDQGITNKCKMNLQDNNGNDIGFIGFHQFNNIAKLVAS | |
| | NWYNRQIERSSRTLGCSWEFIPVDDGWGERPLQ | |
| ^{ci}BoNT/EnB | MVTINDLHYSDPIDEDNIINMRIPLYDLEVDDQFINHNVPDLKAFQVFPNV | 32 |
| w/ linker that | WVVPERYTFYSTMKNLDAPANPSRSSYYDPTYLQSDAEKEVFLQQMILL | |
| contains thrombin | FKRINSTQEGQQFLNLLSRSIPVPYESNGDVAMGTTQVIKQMDDKGNVL | |
| cleavage sites | KHRRAHIIIYGPGPDLMAKGSKALTKSRETGRGCMAEIYFSPMYHKTYST | |
| between LC and | KLTNKNSLVDKSVQEFVPDPAVTLIHQLCHGLHALYGIDLGNVGSWEFN | |
| Hn | SNPNSLFSSWFSSKEAVNFEEVMTFGGEDVKVIKSEIDKKIPGILNLIKTTV | |
| | EPIINKITDPHDEMLQCLQSKYPSLKGTLGQFFFDDTQLEKDIRDLWMVM | |
| | NETMFAENLKALTAARFLVPKVENIVQVDILSPNVYTIDKGFNHLSKGFK | |
| | GQSVSQSYFRKISALARGAVVRACHKAIDGRSLGGSLVPRGSGGSAAAY | |
| | NKTLDCIEILEDDLFIMSSKDSFTDTDFSEPSVGPVSYKAKKGADTILDSTL | |
| | SNYDFSKEINFTSTVPIITVEDPLETDEDVPVISEDRTVYVDDYTTFHFLEA | |
| | QKIGKEVVPTQTKVVFTTNMEEALFDSKKVYTVFENTASRINEAGTGIAN | |
| | GMMFYQWLKGIVQDFTEEATQKDTFDKISDVTMIVPYLGNILNIGNDIRK | |
| | GDFMGAVELGGVTILLEAIPELTLPVLIGLTIIEDELEKEQVSQTVYNVLD | |
| | KRDEKWEEVYGFVKQQWWWMVHTQFETRILHAYQALNHQVEAIKAN | |
| | MTYQLANYRGNQEDKELLEKAIDDTLQSLYYAVDQAMHNIKRFLIQSSK | |
| | SYLLNQMLPKTKEQLLAFDQQTLRNVNDFINKNQGVLGESLAKDLKKK | |
| | VEKRLTSLPVFNLEDLPISEFEDLIHSHEIDIQDSEVLNIGVNNGKIQDLSG | |
| | ENTPLTLGENLHILNNIILNLRYKDNNLIDLSGYGAKVEVYDGVELNDKN | |
| | QFKLTSSANSKIRVTQNQNIIFNSVFLDFSVSFWIRIPKYKNDGIQNYIHNE | |
| | YTIINCMKNNSGWKISIRGNRIIWTLIDINGKTKSVFFEYNIREDISEYINR | |
| | WFFVTITNNLNNAKIYINGKLESNTDIKDIREVIANGEIIFKLDGDIDRTQFI | |
| | WMKYFSIFNTELSQSNIEERYKIQSYSEYLKDFWGNPLMYNKEYYMFNA | |
| | GNKNSYIKLKKDSPVGEILTRSKYNQNSKYINYRDLYIGEKFIIRRKSNSQ | |
| | SINDDIVRKEDYIYLDFFNLNQEWRVYTYKYFKKEEEKLFLAPISDSDEFY | |
| | NTIQIKEYDEQPTYSCQLLFKKDEESTDEIGLIGIHRFYESGIVFEEYKDYF | |
| | CISKWYLKEVKRKPYNLKLGCNWQFIPKDEGWTE | |
| ^{ci}BoNT/EnC | MVTINDLHYSDPIDEDNIINMRIPLYDLEVDDQFINHNVPDLKAFQVFPNV | 33 |
| w/ linker that | WVVPERYTFYSTMKNLDAPANPSRSSYYDPTYLQSDAEKEVFLQQMILL | |
| contains thrombin | FKRINSTQEGQQFLNLLSRSIPVPYESNGDVAMGTTQVIKQMDDKGNVL | |
| cleavage sites | KHRRAHIIIYGPGPDLMAKGSKALTKSRETGRGCMAEIYFSPMYHKTYST | |
| between LC and | KLTNKNSLVDKSVQEFVPDPAVTLIHQLCHGLHALYGIDLGNVGSWEFN | |
| Hn | SNPNSLFSSWFSSKEAVNFEEVMTFGGEDVKVIKSEIDKKIPGILNLIKTTV | |
| | EPIINKITDPHDEMLQCLQSKYPSLKGTLGQFFFDDTQLEKDIRDLWMVM | |
| | NETMFAENLKALTAARFLVPKVENIVQVDILSPNVYTIDKGFNHLSKGFK | |
| | GQSVSQSYFRKISALARGAVVRACHKAIDGRSLGGSLVPRGSGGSAAAY | |
| | NKTLDCIEILEDDLFIMSSKDSFTDTDFSEPSVGPVSYKAKKGADTILDSTL | |
| | SNYDFSKEINFTSTVPIITVEDPLETDEDVPVISEDRTVYVDDYTTFHFLEA | |
| | QKIGKEVVPTQTKVVFTTNMEEALFDSKKVYTVFENTASRINEAGTGIAN | |
| | GMMFYQWLKGIVQDFTEEATQKDTFDKISDVTMIVPYLGNILNIGNDIRK | |
| | GDFMGAVELGGVTILLEAIPELTLPVLIGLTIIEDELEKEQVSQTVYNVLD | |
| | KRDEKWEEVYGFVKQQWWWMVHTQFETRILHAYQALNHQVEAIKAN | |
| | MTYQLANYRGNQEDKELLEKAIDDTLQSLYYAVDQAMHNIKRFLIQSSK | |
| | SYLLNQMLPKTKEQLLAFDQQTLRNVNDFINKNQGVLGESLAKDLKKK | |
| | VEKRLTSLPVFNLEDLPISEFEDLIHSHEIDIQDSEVLNIGVNNGKIQDLSG | |
| | ENTPLTLGENLHINDSKILSLQNRKNTLVDTSGYNAEVSEEGDVQLNPIFP | |
| | FDFKLGSSGEDRGKVIVTQNENIVYNSMYESFSISFWIRINKWVSNLPGYT | |
| | IIDSVKNNSGWSIGIISNFLVFTLKQNEDSEQSINFSYDISNNAPGYNKWFF | |
| | VTVTNNMMGNMKIYINGKLIDTIKVKELTGINFSKTITFEINKIPDTGLITS | |
| | DSDNINMWIRDFYIFAKELDGKDINILFNSLQYTNVVKDYWGNDLRYNK | |
| | EYYMVNIDYLNRYMYANSRQIVFNTRRNNNDFNEGYKIIIKRIRGNTNDT | |
| | RVRGGDILYFDMTINNKAYNLFMKNETMYADNHSTEDIYAIGLREQTKD | |
| | INDNIIFQIQPMNNTYYYASQIFKSNFNGENISGICSIGTYRFRLGGDWYRH | |
| | NYLVPTVKQGNYASLLESTSTHWGFVPVSE | |
| ^{ci}BoNT/EnD | MVTINDLHYSDPIDEDNIINMRIPLYDLEVDDQFINHNVPDLKAFQVFPNV | 34 |
| w/ linker that | WVVPERYTFYSTMKNLDAPANPSRSSYYDPTYLQSDAEKEVFLQQMILL | |
| contains thrombin | FKRINSTQEGQQFLNLLSRSIPVPYESNGDVAMGTTQVIKQMDDKGNVL | |
| cleavage sites | KHRRAHIIIYGPGPDLMAKGSKALTKSRETGRGCMAEIYFSPMYHKTYST | |
| between LC and | KLTNKNSLVDKSVQEFVPDPAVTLIHQLCHGLHALYGIDLGNVGSWEFN | |
| Hn | SNPNSLFSSWFSSKEAVNFEEVMTFGGEDVKVIKSEIDKKIPGILNLIKTTV | |
| | EPIINKITDPHDEMLQCLQSKYPSLKGTLGQFFFDDTQLEKDIRDLWMVM | |
| | NETMFAENLKALTAARFLVPKVENIVQVDILSPNVYTIDKGFNHLSKGFK | |
| | GQSVSQSYFRKISALARGAVVRACHKAIDGRSLGGSLVPRGSGGSAAAY | |
| | NKTLDCIEILEDDLFIMSSKDSFTDTDFSEPSVGPVSYKAKKGADTILDSTL | |
| | SNYDFSKEINFTSTVPIITVEDPLETDEDVPVISEDRTVYVDDYTTFHFLEA | |
| | QKIGKEVVPTQTKVVFTTNMEEALFDSKKVYTVFENTASRINEAGTGIAN | |
| | GMMFYQWLKGIVQDFTEEATQKDTFDKISDVTMIVPYLGNILNIGNDIRK | |
| | GDFMGAVELGGVTILLEAIPELTLPVLIGLTIIEDELEKEQVSQTVYNVLD | |
| | KRDEKWEEVYGFVKQQWWWMVHTQFETRILHAYQALNHQVEAIKAN | |
| | MTYQLANYRGNQEDKELLEKAIDDTLQSLYYAVDQAMHNIKRFLIQSSK | |
| | SYLLNQMLPKTKEQLLAFDQQTLRNVNDFINKNQGVLGESLAKDLKKK | |
| | VEKRLTSLPVFNLEDLPISEFEDLIHSHEIDIQDSEVLNIGVNNGKIQDLSG | |
| | ENTPLTLGENLHINDSKILSLQNKKNALVDTSGYNAEVRVGDNVQLNTIY | |
| | TNDFKLSSSGDKIIVNLNNNILYSAIYENSSVSFWIKISKDLTNSHNEYTIIN | |
| | SIEQNSGWKLCIRNGNIEWILQDVNRKYKSLIFDYSESLSHTGYTNKWFF | |
| | VTITNNIMGYMKLYINGELKQSQKIEDLDEVKLDKTIVFGIDENIDENQM | |
| | LWIRDFNIFSKELSNEDINIVYEGQILRNVIKDYWGNPLKFDTEYYIINDN | |
| | YIDRYIAPESNVLVLVQYPDRSKLYTGNPITIKSVSDKNPYSRILNGDNIIL | |
| | HMLYNSRKYMIIRDTDTIYATQGGECSQNCVYALKLQSNLGNYGIGIFSI | |
| | KNIVSKNKYCSQIFSSFRENTMLLADIYKPWRFSFKNAYTPVAVTNYETK | |
| | LLSTSSFWKFISRDPGWVE | |
| ^{ci}BoNT/EnE | MVTINDLHYSDPIDEDNIINMRIPLYDLEVDDQFINHNVPDLKAFQVFPNV | 35 |
| w/ linker that | WVVPERYTFYSTMKNLDAPANPSRSSYYDPTYLQSDAEKEVFLQQMILL | |
| contains thrombin | FKRINSTQEGQQFLNLLSRSIPVPYESNGDVAMGTTQVIKQMDDKGNVL | |
| cleavage sites | KHRRAHIIIYGPGPDLMAKGSKALTKSRETGRGCMAEIYFSPMYHKTYST | |
| between LC and | KLTNKNSLDKSVQEFVPDPAVTLIHQLCHGLHALYGIDLGNVGSWEFN | |
| Hn | SNPNSLFSSWFSSKEAVNFEEVMTFGGEDVKVIKSEIDKKIPGILNLIKTTV | |
| | EPIINKITDPHDEMLQCLQSKYPSLKGTLGQFFFDDTQLEKDIRDLWMVM | |
| | NETMFAENLKALTAARFLVPKVENIVQVDILSPNVYTIDKGFNHLSKGFK | |
| | GQSVSQSYFRKISALARGAVVRACHKAIDGRSLGGSLVPRGSGGSAAAY | |
| | NKTLDCIEILEDDLFIMSSKDSFTDTDFSEPSVGPVSYKAKKGADTILDSTL | |
| | SNYDFSKEINFTSTVPIITVEDPLETDEDVPVISEDRTVYVDDYTTFHFLEA | |
| | QKIGKEVVPTQTKVVFTTNMEEALFDSKKVYTVFENTASRINEAGTGIAN | |
| | GMMFYQWLKGIVQDFTEEATQKDTFDKISDVTMIVPYLGNILNIGNDIRK | |
| | GDFMGAVELGGVTILLEAIPELTLPVLIGLTIIEDELEKEQVSQTVYNVLD | |
| | KRDEKWEEVYGFVKQQWWWMVHTQFETRILHAYQALNHQVEAIKAN | |
| | MTYQLANYRGNQEDKELLEKAIDDTLQSLYYAVDQAMHNIKRFLIQSSK | |
| | SYLLNQMLPKTKEQLLAFDQQTLRNVNDFINKNQGVLGESLAKDLKKK | |
| | VEKRLTSLPVFNLEDLPISEFEDLIHSHEIDIQDSEVLNIGVNNGKIQDLSG | |
| | ENTPLTLGENLHIKSSSVLNMRYKNDKYVDTSGYDSNININGDVYKYPT | |
| | NKNQFGIYNDKLSEVNISQNDYIIYDNKYKNFSISFWVRIPNYDNKIVNV | |
| | NNEYTIINCMRDNNSGWKVSLNHNEIIWTLQDNAGINQKLAFNYGNANG | |
| | ISDYINKWIFVTITNDRLGDSKLYINGNLIDQKSILNLGNIHVSDNILFKIVN | |
| | CSYTRYIGIRYFNIFDKELDETEIQTLYSNEPNTNILKDFWGNYLLYDKEY | |
| | YLLNVLKPNNFIDRRKDSTLSINNIRSTILLANRLYSGIKVKIQRVNNSSTN | |
| | DNLVRKNDQVYINFVASKTHLFPLYADTATTNKEKTIKISSSGNRFNQVV | |
| | VMNSVGNNCTMNFKNNNGNNIGLLGFKADTVVASTWYYTHMRDHTNS | |
| | NGCFWNFISEEHGWQEK | |
| ^{ci}BoNT/EnF | MVTINDLHYSDPIDEDNIINMRIPLYDLEVDDQFINHNVPDLKAFQVFPNV | 36 |
| w/ linker that | WVVPERYTFYSTMKNLDAPANPSRSSYYDPTYLQSDAEKEVFLQQMILL | |
| contains thrombin | FKRINSTQEGQQFLNLLSRSIPVPYESNGDVAMGTTQVIKQMDDKGNVL | |
| cleavage sites | KHRRAHIIIYGPGPDLMAKGSKALTKSRETGRGCMAEIYFSPMYHKTYST | |
| between LC and | KLTNKNSLVDKSVQEFVPDPAVTLIHQLCHGLHALYGIDLGNVGSWEFN | |
| Hn | SNPNSLFSSWFSSKEAVNFEEVMTFGGEDVKVIKSEIDKKIPGILNLIKTTV | |
| | EPIINKITDPHDEMLQCLQSKYPSLKGTLGQFFFDDTQLEKDIRDLWMVM | |
| | NETMFAENLKALTAARFLVPKVENIVQVDILSPNVYTIDKGFNHLSKGFK | |
| | GQSVSQSYFRKISALARGAVVRACHKAIDGRSLGGSLVPRGSGGSAAAY | |
| | NKTLDCIEILEDDLFIMSSKDSFTDTDFSEPSVGPVSYKAKKGADTILDSTL | |
| | SNYDFSKEINFTSTVPIITVEDPLETDEDVPVISEDRTVYVDDYTTFHFLEA | |
| | QKIGKEVVPTQTKVVFTTNMEEALFDSKKVYTVFENTASRINEAGTGIAN | |
| | GMMFYQWLKGIVQDFTEEATQKDTFDKISDVTMIVPYLGNILNIGNDIRK | |
| | GDFMGAVELGGVTILLEAIPELTLPVLIGLTIIEDELEKEQVSQTVYNVLD | |
| | KRDEKWEEVYGFVKQQWWWMVHTQFETRILHAYQALNHQVEAIKAN | |
| | MTYQLANYRGNQEDKELLEKAIDDTLQSLYYAVDQAMHNIKRFLIQSSK | |
| | SYLLNQMLPKTKEQLLAFDQQTLRNVNDFINKNQGVLGESLAKDLKKK | |
| | VEKRLTSLPVFNLEDLPISEFEDLIHSHEIDIQDSEVLNIGVNNGKIQDLSG | |
| | ENTPLTLGENLHIKDNSILDMRYENNKFIDISGYGSNISINGDVYIYSTNRN | |
| | QFGIYSSKPSEVNIAQNNDIIYNGRYQNFSISFWVRIPKYFNKVNLNNEYTI | |
| | IDCIRNNNSGWKISLNYNKIIWTLQDTAGNNQKLVFNYTQMISISDYINK | |
| | WIFVTITNNRLGNSRIYINGNLIDEKSISNLGDIHVSDNILFKIVGCNDTRY | |
| | VGIRYFKVFDTELGKTEIETLYSDEPDPSILKDFWGNYLLYNKRYYLLNL | |
| | LRTDKSITQNSNFLNINQQRGVYQKPNIFSNTRLYTGVEVIIRKNGSTDISN | |
| | TDNFVRKNDLAYINVVDRDVEYRLYADISIAKPEKIIKLIRTSNSNNSLGQ | |
| | IIVMDSIGNNCTMNFQNNNGGNIGLLGFHSNNLVASSWYYNNIRKNTSS | |
| | NGCFWSFISKEHGWQEN | |
| ^{ci}BoNT/EnG | MVTINDLHYSDPIDEDNIINMRIPLYDLEVDDQFINHNVPDLKAFQVFPNV | 37 |
| w/ linker that | WVVPERYTFYSTMKNLDAPANPSRSSYYDPTYLQSDAEKEVFLQQMILL | |
| contains thrombin | FKRINSTQEGQQFLNLLSRSIPVPYESNGDVAMGTTQVIKQMDDKGNVL | |
| cleavage sites | KHRRAHIIIYGPGPDLMAKGSKALTKSRETGRGCMAEIYFSPMYHKTYST | |
| between LC and | KLTNKNSLVDKSVQEFVPDPAVTLIHQLCHGLHALYGIDLGNVGSWEFN | |
| Hn | SNPNSLFSSWFSSKEAVNFEEVMTFGGEDVKVIKSEIDKKIPGILNLIKTTV | |
| | EPIINKITDPHDEMLQCLQSKYPSLKGTLGQFFFDDTQLEKDIRDLWMVM | |
| | NETMFAENLKALTAARFLVPKVENIVQVDILSPNVYTIDKGFNHLSKGFK | |
| | GQSVSQSYFRKISALARGAVVRACHKAIDGRSLGGSLVPRGSGGSAAAY | |
| | NKTLDCIEILEDDLFIMSSKDSFTDTDFSEPSVGPVSYKAKKGADTILDSTL | |
| | SNYDFSKEINFTSTVPIITVEDPLETDEDVPVISEDRTVYVDDYTTFHFLEA | |
| | QKIGKEVVPTQTKVVFTTNMEEALFDSKKVYTVFENTASRINEAGTGIAN | |
| | GMMFYQWLKGIVQDFTEEATQKDTFDKISDVTMIVPYLGNILNIGNDIRK | |
| | GDFMGAVELGGVTILLEAIPELTLPVLIGLTIIEDELEKEQVSQTVYNVLD | |
| | KRDEKWEEVYGFVKQQWWWMVHTQFETRILHAYQALNHQVEAIKAN | |
| | MTYQLANYRGNQEDKELLEKAIDDTLQSLYYAVDQAMHNIKRFLIQSSK | |
| | SYLLNQMLPKTKEQLLAFDQQTLRNVNDFINKNQGVLGESLAKDLKKK | |
| | VEKRLTSLPVFNLEDLPISEFEDLIHSHEIDIQDSEVLNIGVNNGKIQDLSG | |
| | ENTPLTLGENLHISSNAILSLSYRGGRLIDSSGYGATMNVGSDVIFNDIGN | |
| | GQFKLNNSENSNITAHQSKFVVYDSMFDNFSINFWVRTPKYNNNDIQTY | |
| | LQNEYTIISCIKNDSGWKVSIKGNRIIWTLIDVNAKSKSIFFEYSIKDNISDY | |
| | INKWFSITITNDRLGNANIYINGSLKKSEKILNLDRINSSNDIDFKLINCTDT | |
| | TKFVWIKDFNIFGRELNATEVSSLYWIQSSTNTLKDFWGNPLRYDTQYYL | |
| | FNQGMQNIYIKYFSKASMGETAPRTNFNNAAINYQNLYLGLRFIIKKASN | |
| | SRNINNDNIVREGDYIYLNIDNISDESYRVYVLVNSKEIQTQLFLAPINDDP | |
| | TFYDVLQIKKYYEKTTYNCQILCEKDTKTFGLFGIGKFVKDYGYVWDTY | |
| | DNYFCISQWYLRRISENINKLRLGCNWQFIPVDEGWTE | |
| ^{ci}BoNT/EnH | MVTINDLHYSDPIDEDNIINMRIPLYDLEVDDQFINHNVPDLKAFQVFPNV | 38 |
| w/ linker that | WVVPERYTFYSTMKNLDAPANPSRSSYYDPTYLQSDAEKEVFLQQMILL | |
| contains thrombin | FKRINSTQEGQQFLNLLSRSIPVPYESNGDVAMGTTQVIKQMDDKGNVL | |
| cleavage sites | KHRRAHIIIYGPGPDLMAKGSKALTKSRETGRGCMAEIYFSPMYHKTYST | |
| between LC and | KLTNKNSLVDKSVQEFVPDPAVTLIHQLCHGLHALYGIDLGNVGSWEFN | |
| Hn | SNPNSLFSSWFSSKEAVNFEEVMTFGGEDVKVIKSEIDKKIPGILNLIKTTV | |
| | EPIINKITDPHDEMLQCLQSKYPSLKGTLGQFFFDDTQLEKDIRDLWMVM | |
| | NETMFAENLKALTAARFLVPKVENIVQVDILSPNVYTIDKGFNHLSKGFK | |
| | GQSVSQSYFRKISALARGAVVRACHKAIDGRSLGGSLVPRGSGGSAAAY | |
| | NKTLDCIEILEDDLFIMSSKDSFTDTDFSEPSVGPVSYKAKKGADTILDSTL | |
| | SNYDFSKEINFTSTVPIITVEDPLETDEDVPVISEDRTVYVDDYTTFHFLEA | |
| | QKIGKEVVPTQTKVVFTTNMEEALFDSKKVYTVFENTASRINEAGTGIAN | |
| | GMMFYQWLKGIVQDFTEEATQKDTFDKISDVTMIVPYLGNILNIGNDIRK | |
| | GDFMGAVELGGVTILLEAIPELTLPVLIGLTIIEDELEKEQVSQTVYNVLD | |
| | KRDEKWEEVYGFVKQQWWWMVHTQFETRILHAYQALNHQVEAIKAN | |
| | MTYQLANYRGNQEDKELLEKAIDDTLQSLYYAVDQAMHNIKRFLIQSSK | |
| | SYLLNQMLPKTKEQLLAFDQQTLRNVNDFINKNQGVLGESLAKDLKKK | |
| | VEKRLTSLPVFNLEDLPISEFEDLIHSHEIDIQDSEVLNIGVNNGKIQDLSG | |
| | ENTPLTLGENLHLKYNCILNIKYEMDRDKLVDSSGYRSRINIGTGVKFSEI | |
| | DKNQVQLSNLESSKIEVILNNGVIYNSMYENFSTSFWIRIPKYFRNINNEY | |
| | KIISCMQNNSGWEVSLNFSNMNSKIIWTLQDTEGIKKTVVFQYTQNINISD | |
| | YINRWIFVTITNNRLSNSKIYINGRLINEESISDLGNIHASNNIMFKLDGCR | |
| | DPHRYIWIKYFNLFDKELNKKEIKDLYDNQSNSGILKDFWGDYLQYDKP | |
| | YYMLNLYDPNKYLDVNNVGIRGYMYLKGPRGRIVTTNIYLNSTLYMGT | |
| | KFIIKKYASGNKDNIVRNNDRVYINVVVKNKEYRLATNASQAGVEKILS | |
| | AVEIPDVGNLSQVVVMKSENDQGIRNKCKMNLQDNNGNDIGFIGFHQFN | |
| | NIAKLVASNWYNRQIGKASRTFGCSWEFIPVDDGWGESSL | |
| ^{ci}BoNT/PMP1A | MLQIRVFNYNDPIDGENIVELRYHNRSPVKAFQIVDGIWIIPERYNFTNDT | 96 |
| w/ linker that | KKVPDDRALTILEDEVFAVRENDYLTTDVNEKNSFLNNITKLFKRINSSNI | |
| contains thrombin | GNQLLNYISTSVPYPVVSTNSIKARDYNTIKFDSIDGRRITKSANVLIYGPS | |
| cleavage sites | MKNLLDKQTRAINGEEAKNGIGCLSDIIFSPNYLSVQTVSSSRFVEDPASS | |
| between LC and | LTHQLIHALHNLYGIQYPGEEKFKFGGFIDKLLGTRECIDYEEVLTYGGK | |
| Hn | DSEIIRKKIDKSLYPDDFVNKYGEMYKRIKGSNPYYPDEKKLKQSFLNRM | |
| | NPFDQNGTFDTKEFKNHLMDLWFGLNESEFAKEKKILVAKHFITKQINPK | |
| | YTELTNDVYTEDKGFVNGQSIDNQNFKIIDDLISKKVKLCHKAIDGRSLG | |
| | GSLVPRGSGGSAAAYNKTLDCIDVNKEDLYFISDKEGFENIDFSEPEIRYD | |
| | SNVTTATTSSFTDHFLVNRTFNDSDRFPPVELEYAIEPAEIVDNTIMPDIDQ | |
| | KSEISLDNLTTFHYLNAQKMDLGFDSSKEQLKMVTSIEESLLDSKKVYTP | |
| | FTRTAHSVNERISGIAESYLFYQWLKTVINDFTDELNQKSNTDKVADISWI | |
| | IPYVGPALNIGLDLSHGDFTKAFEDLGVSILFAIAPEFATISLVALSIYENIE | |
| | EDSQKEKVINKVENTLARRIEKWHQVYAFMVAQWWGMVHTQIDTRIH | |
| | QMYESLSHQIIAIKANMEYQLSHYKGPDNDKLLLKDYIYEAEIALNTSAN | |
| | RAMKNIERFMIESSISYLKNNLIPSVVENLKKFDADTKKNLDQFIDKNSSV | |
| | LGSDLHILKSQVDLELNPTTKVAFNIQSIPDFDINALIDRLGIQIINTSILNLR | |
| | YESNHLIDLSRYASKINIGSKVNFDPIDKNQIQLFNLESSKIEVILKNAIVY | |
| | NSMYENFSTSFWIRIPKYFNSISLNNEYTIINCMENNSGWKVSLNYGEIIW | |
| | TLQDTQEIKQRVVFKYSQMINISDYINRWIFVTITNNRLNNSKIYINGRLID | |
| | QKPISNLGNIHASNNIMFKLDGCRDTHRYIWIKYFNLFDKELNEKEIKDL | |
| | YDNQSNSGILKDFWGDYLQYDKPYYMLNLYDPNKYVDVNNVGIRGYM | |
| | YLKGPRGSVMTTNIYLNSSLYRGTKFIIKKYASGNKDNIVRNNDRVYINV | |
| | VVKNKEYRLATNASQAGVEKILSALEIPDVGNLSQVVVMKSKNDQGITN | |
| | KCKMNLQDNNGNDIGFIGFHQFNNIAKLVASNWYNRQIERSSRTLGCSW | |
| | EFIPVDDGWGERPLQ | |
| ^{ci}BoNT/PMP1B | MLQIRVFNYNDPIDGENIVELRYHNRSPVKAFQIVDGIWIIPERYNFTNDT | 97 |
| w/ linker that | KKVPDDRALTILEDEVFAVRENDYLTTDVNEKNSFLNNITKLFKRINSSNI | |
| contains thrombin | GNQLLNYISTSVPYPVVSTNSIKARDYNTIKFDSIDGRRITKSANVLIYGPS | |
| cleavage sites | MKNLLDKQTRAINGEEAKNGIGCLSDIIFSPNYLSVQTVSSSRFVEDPASS | |
| between LC and | LTHQLIHALHNLYGIQYPGEEKFKFGGFIDKLLGTRECIDYEEVLTYGGK | |
| Hn | DSEIIRKKIDKSLYPDDFVNKYGEMYKRIKGSNPYYPDEKKLKQSFLNRM | |
| | NPFDQNGTFDTKEFKNHLMDLWFGLNESEFAKEKKILVAKHFITKQINPK | |
| | YTELTNDVYTEDKGFVNGQSIDNQNFKIIDDLISKKVKLCHKAIDGRSLG | |
| | GSLVPRGSGGSAAAYNKTLDCIDVNKEDLYFISDKEGFENIDFSEPEIRYD | |
| | SNVTTATTSSFTDHFLVNRTFNDSDRFPPVELEYAIEPAEIVDNTIMPDIDQ | |
| | KSEISLDNLTTFHYLNAQKMDLGFDSSKEQLKMVTSIEESLLDSKKVYTP | |
| | FTRTAHSVNERISGIAESYLFYQWLKTVINDFTDELNQKSNTDKVADISWI | |
| | IPYVGPALNIGLDLSHGDFTKAFEDLGVSILFAIAPEFATISLVALSIYENIE | |
| | EDSQKEKVINKVENTLARRIEKWHQVYAFMVAQWWGMVHTQIDTRIH | |
| | QMYESLSHQIIAIKANMEYQLSHYKGPDNDKLLLKDYIYEAEIALNTSAN | |
| | RAMKNIERFMIESSISYLKNNLIPSVVENLKKFDADTKKNLDQFIDKNSSV | |
| | LGSDLHILKSQVDLELNPTTKVAFNIQSIPDFDINALIDRLGIQILNNIILNL | |
| | RYKDNNLIDLSGYGAKVEVYDGVELNDKNQFKLTSSANSKIRVTQNQNI | |
| | IFNSVFLDFSVSFWIRIPKYKNDGIQNYIHNEYTIINCMKNNSGWKISIRGN | |
| | RIIWTLIDINGKTKSVFFEYNIREDISEYINRWFFVTITNNLNNAKIYINGKL | |
| | ESNTDIKDIREVIANGEIIFKLDGDIDRTQFIWMKYFSIFNTELSQSNIEERY | |
| | KIQSYSEYLKDFWGNPLMYNKEYYMFNAGNKNSYIKLKKDSPVGEILTR | |
| | SKYNQNSKYINYRDLYIGEKFIIRRKSNSQSINDDIVRKEDYIYLDFFNLN | |
| | QEWRVYTYKYFKKEEEKLFLAPISDSDEFYNTIQIKEYDEQPTYSCQLLF | |
| | KKDEESTDEIGLIGIHRFYESGIVFEEYKDYFCISKWYLKEVKRKPYNLKL | |
| | GCNWQFIPKDEGWTE | |
| ^{ci}BoNT/PMP1C | MLQIRVFNYNDPIDGENIVELRYHNRSPVKAFQIVDGIWIIPERYNFTNDT | 98 |
| w/ linker that | KKVPDDRALTILEDEVFAVRENDYLTTDVNEKNSFLNNITKLFKRINSSNI | |
| contains thrombin | GNQLLNYISTSVPYPVVSTNSIKARDYNTIKFDSIDGRRITKSANVLIYGPS | |
| cleavage sites | MKNLLDKQTRAINGEEAKNGIGCLSDIIFSPNYLSVQTVSSSRFVEDPASS | |
| between LC and | LTHQLIHALHNLYGIQYPGEEKFKFGGFIDKLLGTRECIDYEEVLTYGGK | |
| Hn | DSEIIRKKIDKSLYPDDFVNKYGEMYKRIKGSNPYYPDEKKLKQSFLNRM | |
| | NPFDQNGTFDTKEFKNHLMDLWFGLNESEFAKEKKILVAKHFITKQINPK | |
| | YTELTNDVYTEDKGFVNGQSIDNQNFKIIDDLISKKVKLCHKAIDGRSLG | |
| | GSLVPRGSGGSAAAYNKTLDCIDVNKEDLYFISDKEGFENIDFSEPEIRYD | |
| | SNVTTATTSSFTDHFLVNRTFNDSDRFPPVELEYAIEPAEIVDNTIMPDIDQ | |
| | KSEISLDNLTTFHYLNAQKMDLGFDSSKEQLKMVTSIEESLLDSKKVYTP | |
| | FTRTAHSVNERISGIAESYLFYQWLKTVINDFTDELNQKSNTDKVADISWI | |
| | IPYVGPALNIGLDLSHGDFTKAFEDLGVSILFAIAPEFATISLVALSIYENIE | |
| | EDSQKEKVINKVENTLARRIEKWHQVYAFMVAQWWGMVHTQIDTRIH | |
| | QMYESLSHQIIAIKANMEYQLSHYKGPDNDKLLLKDYIYEAEIALNTSAN | |
| | RAMKNIERFMIESSISYLKNNLIPSVVENLKKFDADTKKNLDQFIDKNSSV | |
| | LGSDLHILKSQVDLELNPTTKVAFNIQSIPDFDINALIDRLGIQINDSKILSL | |
| | QNRKNTLVDTSGYNAEVSEEGDVQLNPIFPFDFKLGSSGEDRGKVIVTQN | |
| | ENIVYNSMYESFSISFWIRINKWVSNLPGYTIIDSVKNNSGWSIGIISNFLVF | |
| | TLKQNEDSEQSINFSYDISNNAPGYNKWFFVTVTNNMMGNMKIYINGKL | |
| | IDTIKVKELTGINFSKTITFEINKIPDTGLITSDSDNINMWIRDFYIFAKELD | |
| | GKDINILFNSLQYTNVVKDYWGNDLRYNKEYYMVNIDYLNRYMYANS | |
| | RQIVFNTRRNNNDFNEGYKIIIKRIRGNTNDTRVRGGDILYFDMTINNKA | |
| | YNLFMKNETMYADNHSTEDIYAIGLREQTKDINDNIIFQIQPMNNTYYYA | |
| | SQIFKSNFNGENISGICSIGTYRFRLGGDWYRHNYLVPTVKQGNYASLLE | |
| | STSTHWGFVPVSE | |
| ^{ci}BoNT/PMP1D | MLQIRVFNYNDPIDGENIVELRYHNRSPVKAFQIVDGIWIIPERYNFTNDT | 99 |
| w/ linker that | KKVPDDRALTILEDEVFAVRENDYLTTDVNEKNSFLNNITKLFKRINSSNI | |
| contains thrombin | GNQLLNYISTSVPYPVVSTNSIKARDYNTIKFDSIDGRRITKSANVLIYGPS | |
| cleavage sites | MKNLLDKQTRAINGEEAKNGIGCLSDIIFSPNYLSVQTVSSSRFVEDPASS | |
| between LC and | LTHQLIHALHNLYGIQYPGEEKFKFGGFIDKLLGTRECIDYEEVLTYGGK | |
| Hn | DSEIIRKKIDKSLYPDDFVNKYGEMYKRIKGSNPYYPDEKKLKQSFLNRM | |
| | NPFDQNGTFDTKEFKNHLMDLWFGLNESEFAKEKKILVAKHFITKQINPK | |
| | YTELTNDVYTEDKGFVNGQSIDNQNFKIIDDLISKKVKLCHKAIDGRSLG | |
| | GSLVPRGSGGSAAAYNKTLDCIDVNKEDLYFISDKEGFENIDFSEPEIRYD | |
| | SNVTTATTSSFTDHFLVNRTFNDSDRFPPVELEYAIEPAEIVDNTIMPDIDQ | |
| | KSEISLDNLTTFHYLNAQKMDLGFDSSKEQLKMVTSIEESLLDSKKVYTP | |
| | FTRTAHSVNERISGIAESYLFYQWLKTVINDFTDELNQKSNTDKVADISWI | |
| | IPYVGPALNIGLDLSHGDFTKAFEDLGVSILFAIAPEFATISLVALSIYENIE | |
| | EDSQKEKVINKVENTLARRIEKWHQVYAFMVAQWWGMVHTQIDTRIH | |
| | QMYESLSHQIIAIKANMEYQLSHYKGPDNDKLLLKDYIYEAEIALNTSAN | |
| | RAMKNIERFMIESSISYLKNNLIPSVVENLKKFDADTKKNLDQFIDKNSSV | |
| | LGSDLHILKSQVDLELNPTTKVAFNIQSIPDFDINALIDRLGIQINDSKILSL | |
| | QNKKNALVDTSGYNAEVRVGDNVQLNTIYTNDFKLSSSGDKIIVNLNNN | |
| | ILYSAIYENSSVSFWIKISKDLTNSHNEYTIINSIEQNSGWKLCIRNGNIEWI | |
| | LQDVNRKYKSLIFDYSESLSHTGYTNKWFFVTITNNIMGYMKLYINGELK | |
| | QSQKIEDLDEVKLDKTIVFGIDENIDENQMLWIRDFNIFSKELSNEDINIVY | |
| | EGQILRNVIKDYWGNPLKFDTEYYIINDNYIDRYIAPESNVLVLVQYPDRS | |
| | KLYTGNPITIKSVSDKNPYSRILNGDNIILHMLYNSRKYMIIRDTDTIYATQ | |
| | GGECSQNCVYALKLQSNLGNYGIGIFSIKNIVSKNKYCSQIFSSFRENTML | |
| | LADIYKPWRFSFKNAYTPVAVTNYETKLLSTSSFWKFISRDPGWVE | |
| ^{ci}BoNT/PMP1E | MLQIRVFNYNDPIDGENIVELRYHNRSPVKAFQIVDGIWIIPERYNFTNDT | 100 |
| w/ linker that | KKVPDDRALTILEDEVFAVRENDYLTTDVNEKNSFLNNITKLFKRINSSNI | |
| contains thrombin | GNQLLNYISTSVPYPVVSTNSIKARDYNTIKFDSIDGRRITKSANVLIYGPS | |
| cleavage sites | MKNLLDKQTRAINGEEAKNGIGCLSDIIFSPNYLSVQTVSSSRFVEDPASS | |
| between LC and | LTHQLIHALHNLYGIQYPGEEKFKFGGFIDKLLGTRECIDYEEVLTYGGK | |
| Hn | DSEIIRKKIDKSLYPDDFVNKYGEMYKRIKGSNPYYPDEKKLKQSFLNRM | |
| | NPFDQNGTFDTKEFKNHLMDLWFGLNESEFAKEKKILVAKHFITKQINPK | |
| | YTELTNDVYTEDKGFVNGQSIDNQNFKIIDDLISKKVKLCHKAIDGRSLG | |
| | GSLVPRGSGGSAAAYNKTLDCIDVNKEDLYFISDKEGFENIDFSEPEIRYD | |
| | SNVTTATTSSFTDHFLVNRTFNDSDRFPPVELEYAIEPAEIVDNTIMPDIDQ | |
| | KSEISLDNLTTFHYLNAQKMDLGFDSSKEQLKMVTSIEESLLDSKKVYTP | |
| | FTRTAHSVNERISGIAESYLFYQWLKTVINDFTDELNQKSNTDKVADISWI | |
| | IPYVGPALNIGLDLSHGDFTKAFEDLGVSILFAIAPEFATISLVALSIYENIE | |
| | EDSQKEKVINKVENTLARRIEKWHQVYAFMVAQWWGMVHTQIDTRIH | |
| | QMYESLSHQIIAIKANMEYQLSHYKGPDNDKLLLKDYIYEAEIALNTSAN | |
| | RAMKNIERFMIESSISYLKNNLIPSVVENLKKFDADTKKNLDQFIDKNSSV | |
| | LGSDLHILKSQVDLELNPTTKVAFNIQSIPDFDINALIDRLGIQIKSSSVLN | |
| | MRYKNDKYVDTSGYDSNININGDVYKYPTNKNQFGIYNDKLSEVNISQN | |
| | DYIIYDNKYKNFSISFWVRIPNYDNKIVNVNNEYTIINCMRDNNSGWKVS | |
| | LNHNEIIWTLQDNAGINQKLAFNYGNANGISDYINKWIFVTITNDRLGDS | |
| | KLYINGNLIDQKSILNLGNIHVSDNILFKIVNCSYTRYIGIRYFNIFDKELDE | |
| | TEIQTLYSNEPNTNILKDFWGNYLLYDKEYYLLNVLKPNNFIDRRKDSTL | |
| | SINNIRSTILLANRLYSGIKVKIQRVNNSSTNDNLVRKNDQVYINFVASKT | |
| | HLFPLYADTATTNKEKTIKISSSGNRFNQVVVMNSVGNNCTMNFKNNNG | |
| | NNIGLLGFKADTVVASTWYYTHMRDHTNSNGCFWNFISEEHGWQEK | |
| ^{ci}BoNT/PMP1F | MLQIRVFNYNDPIDGENIVELRYHNRSPVKAFQIVDGIWIIPERYNFTNDT | 101 |
| w/ linker that | KKVPDDRALTILEDEVFAVRENDYLTTDVNEKNSFLNNITKLFKRINSSNI | |
| contains thrombin | GNQLLNYISTSVPYPVVSTNSIKARDYNTIKFDSIDGRRITKSANVLIYGPS | |
| cleavage sites | MKNLLDKQTRAINGEEAKNGIGCLSDIIFSPNYLSVQTVSSSRFVEDPASS | |
| between LC and | LTHQLIHALHNLYGIQYPGEEKFKFGGFIDKLLGTRECIDYEEVLTYGGK | |
| Hn | DSEIIRKKIDKSLYPDDFVNKYGEMYKRIKGSNPYYPDEKKLKQSFLNRM | |
| | NPFDQNGTFDTKEFKNHLMDLWFGLNESEFAKEKKILVAKHFITKQINPK | |
| | YTELTNDVYTEDKGFVNGQSIDNQNFKIIDDLISKKVKLCHKAIDGRSLG | |
| | GSLVPRGSGGSAAAYNKTLDCIDVNKEDLYFISDKEGFENIDFSEPEIRYD | |
| | SNVTTATTSSFTDHFLVNRTFNDSDRFPPVELEYAIEPAEIVDNTIMPDIDQ | |
| | KSEISLDNLTTFHYLNAQKMDLGFDSSKEQLKMVTSIEESLLDSKKVYTP | |
| | FTRTAHSVNERISGIAESYLFYQWLKTVINDFTDELNQKSNTDKVADISWI | |
| | IPYVGPALNIGLDLSHGDFTKAFEDLGVSILFAIAPEFATISLVALSIYENIE | |
| | EDSQKEKVINKVENTLARRIEKWHQVYAFMVAQWWGMVHTQIDTRIH | |
| | QMYESLSHQIIAIKANMEYQLSHYKGPDNDKLLLKDYIYEAEIALNTSAN | |
| | RAMKNIERFMIESSISYLKNNLIPSVVENLKKFDADTKKNLDQFIDKNSSV | |
| | LGSDLHILKSQVDLELNPTTKVAFNIQSIPDFDINALIDRLGIQIKDNSILD | |
| | MRYENNKFIDISGYGSNISINGDVYIYSTNRNQFGIYSSKPSEVNIAQNNDI | |
| | IYNGRYQNFSISFWVRIPKYFNKVNLNNEYTIIDCIRNNNSGWKISLNYNK | |
| | IIWTLQDTAGNNQKLVFNYTQMISISDYINKWIFVTITNNRLGNSRIYING | |
| | NLIDEKSISNLGDIHVSDNILFKIVGCNDTRYVGIRYFKVFDTELGKTEIET | |
| | LYSDEPDPSILKDFWGNYLLYNKRYYLLNLLRTDKSITQNSNFLNINQQR | |
| | GVYQKPNIFSNTRLYTGVEVIIRKNGSTDISNTDNFVRKNDLAYINVVDR | |
| | DVEYRLYADISIAKPEKIIKLIRTSNSNNSLGQIIVMDSIGNNCTMNFQNNN | |
| | GGNIGLLGFHSNNLVASSWYYNNIRKNTSSNGCFWSFISKEHGWQEN | |
| ^{ci}BoNT/PMP1G | MLQIRVFNYNDPIDGENIVELRYHNRSPVKAFQIVDGIWIIPERYNFTNDT | 102 |
| w/ linker that | KKVPDDRALTILEDEVFAVRENDYLTTDVNEKNSFLNNITKLFKRINSSNI | |
| contains thrombin | GNQLLNYISTSVPYPVVSTNSIKARDYNTIKFDSIDGRRITKSANVLIYGPS | |
| cleavage sites | MKNLLDKQTRAINGEEAKNGIGCLSDIIFSPNYLSVQTVSSSRFVEDPASS | |
| between LC and | LTHQLIHALHNLYGIQYPGEEKFKFGGFIDKLLGTRECIDYEEVLTYGGK | |
| Hn | DSEIIRKKIDKSLYPDDFVNKYGEMYKRIKGSNPYYPDEKKLKQSFLNRM | |
| | NPFDQNGTFDTKEFKNHLMDLWFGLNESEFAKEKKILVAKHFITKQINPK | |
| | YTELTNDVYTEDKGFVNGQSIDNQNFKIIDDLISKKVKLCHKAIDGRSLG | |
| | GSLVPRGSGGSAAAYNKTLDCIDVNKEDLYFISDKEGFENIDFSEPEIRYD | |
| | SNVTTATTSSFTDHFLVNRTFNDSDRFPPVELEYAIEPAEIVDNTIMPDIDQ | |
| | KSEISLDNLTTFHYLNAQKMDLGFDSSKEQLKMVTSIEESLLDSKKVYTP | |
| | FTRTAHSVNERISGIAESYLFYQWLKTVINDFTDELNQKSNTDKVADISWI | |
| | IPYVGPALNIGLDLSHGDFTKAFEDLGVSILFAIAPEFATISLVALSIYENIE | |
| | EDSQKEKVINKVENTLARRIEKWHQVYAFMVAQWWGMVHTQIDTRIH | |
| | QMYESLSHQIIAIKANMEYQLSHYKGPDNDKLLLKDYIYEAEIALNTSAN | |
| | RAMKNIERFMIESSISYLKNNLIPSVVENLKKFDADTKKNLDQFIDKNSSV | |
| | LGSDLHILKSQVDLELNPTTKVAFNIQSIPDFDINALIDRLGIQISSNAILSLS | |
| | YRGGRLIDSSGYGATMNVGSDVIFNDIGNGQFKLNNSENSNITAHQSKFV | |
| | VYDSMFDNFSINFWVRTPKYNNNDIQTYLQNEYTIISCIKNDSGWKVSIK | |
| | GNRIIWTLIDVNAKSKSIFFEYSIKDNISDYINKWFSITITNDRLGNANIYIN | |
| | GSLKKSEKILNLDRINSSNDIDFKLINCTDTTKFVWIKDFNIFGRELNATEV | |
| | SSLYWIQSSTNTLKDFWGNPLRYDTQYYLFNQGMQNIYIKYFSKASMGE | |
| | TAPRTNFNNAAINYQNLYLGLRFIIKKASNSRNINNDNIVREGDYIYLNID | |
| | NISDESYRVYVLVNSKEIQTQLFLAPINDDPTFYDVLQIKKYYEKTTYNC | |
| | QILCEKDTKTFGLFGIGKFVKDYGYVWDTYDNYFCISQWYLRRISENINK | |
| | LRLGCNWQFIPVDEGWTE | |
| ^{ci}BoNT/PMP1H | MLQIRVFNYNDPIDGENIVELRYHNRSPVKAFQIVDGIWIIPERYNFTNDT | 103 |
| w/ linker that | KKVPDDRALTILEDEVFAVRENDYLTTDVNEKNSFLNNITKLFKRINSSNI | |
| contains thrombin | GNQLLNYISTSVPYPVVSTNSIKARDYNTIKFDSIDGRRITKSANVLIYGPS | |
| cleavage sites | MKNLLDKQTRAINGEEAKNGIGCLSDIIFSPNYLSVQTVSSSRFVEDPASS | |
| between LC and | LTHQLIHALHNLYGIQYPGEEKFKFGGFIDKLLGTRECIDYEEVLTYGGK | |
| Hn | DSEIIRKKIDKSLYPDDFVNKYGEMYKRIKGSNPYYPDEKKLKQSFLNRM | |
| | NPFDQNGTFDTKEFKNHLMDLWFGLNESEFAKEKKILVAKHFITKQINPK | |
| | YTELTNDVYTEDKGFVNGQSIDNQNFKIIDDLISKKVKLCHKAIDGRSLG | |
| | GSLVPRGSGGSAAAYNKTLDCIDVNKEDLYFISDKEGFENIDFSEPEIRYD | |
| | SNVTTATTSSFTDHFLVNRTFNDSDRFPPVELEYAIEPAEIVDNTIMPDIDQ | |
| | KSEISLDNLTTFHYLNAQKMDLGFDSSKEQLKMVTSIEESLLDSKKVYTP | |
| | FTRTAHSVNERISGIAESYLFYQWLKTVINDFTDELNQKSNTDKVADISWI | |
| | IPYVGPALNIGLDLSHGDFTKAFEDLGVSILFAIAPEFATISLVALSIYENIE | |
| | EDSQKEKVINKVENTLARRIEKWHQVYAFMVAQWWGMVHTQIDTRIH | |
| | QMYESLSHQIIAIKANMEYQLSHYKGPDNDKLLLKDYIYEAEIALNTSAN | |
| | RAMKNIERFMIESSISYLKNNLIPSVVENLKKFDADTKKNLDQFIDKNSSV | |
| | LGSDLHILKSQVDLELNPTTKVAFNIQSIPDFDINALIDRLGIQLKYNCILNI | |
| | KYEMDRDKLVDSSGYRSRINIGTGVKFSEIDKNQVQLSNLESSKIEVILNN | |
| | GVIYNSMYENFSTSFWIRIPKYFRNINNEYKIISCMQNNSGWEVSLNFSN | |
| | MNSKIIWTLQDTEGIKKTVVFQYTQNINISDYINRWIFVTITNNRLSNSKIY | |
| | INGRLINEESISDLGNIHASNNIMFKLDGCRDPHRYIWIKYFNLFDKELNK | |
| | KEIKDLYDNQSNSGILKDFWGDYLQYDKPYYMLNLYDPNKYLDVNNVG | |
| | IRGYMYLKGPRGRIVTTNIYLNSTLYMGTKFIIKKYASGNKDNIVRNNDR | |
| | VYINVVVKNKEYRLATNASQAGVEKILSAVEIPDVGNLSQVVVMKSEND | |
| | QGIRNKCKMNLQDNNGNDIGFIGFHQFNNIAKLVASNWYNRQIGKASRT | |
| | FGCSWEFIPVDDGWGESSL | |
| ^{ci}LC/X | MKLEINKFNYNDPIDGINVITMRPPRHSDKINKGKGPFKAFQVIKNIWIVP | 39 |
| | ERYNFTNNTNDLNIPSEPIMEADAIYNPNYLNTPSEKDEFLQGVIKVLERI | |
| | KSKPEGEKLLELISSSIPLPLVSNGALTLSDNETIAYQENNNIVSNLQANLV | |
| | IYGPGPDIANNATYGLYSTPISNGEGTLSEVSFSPFYLKPFDESYGNYRSL | |
| | VNIVNKFVKREFAPDPASTLMHQLVHVTHNLYGISNRNFYYNFDTGKIET | |
| | SRQQNSLIFEELLTFGGIDSKAISSLIIKKIIETAKNNYTTLISERLNTVTVEN | |
| | DLLKYIKNKIPVQGRLGNFKLDTAEFEKKLNTILFVLNESNLAQRFSILVA | |
| | KHFLKERPIDPIYVNILDDNSYSTLEGFNISSQGSNDFQGQLLESSYFEKIE | |
| | SNALRAFIKI | |
| Hn/X-Hc/A | IEVENKDLFLISNKDSLNDINLSEEKIKPETTVFFKDKLPPQDITLSNYDFT | 40 |
| | EANSIPSISQQNILERNEELYEPIRNSLFEIKTIYVDKLTTFHFLEAQNIDESI | |
| | DSSKIRVELTDSVDEALSNPNKVYSPFKNMSNTINSIETGITSTYIFYQWLR | |
| | SIVKDFSDETGKIDVIDKSSDTLAIVPYIGPLLNIGNDIRHGDFVGAIELAGI | |
| | TALLEYVPEFTIPILVGLEVIGGELAREQVEAIVNNALDKRDQKWAEVYN | |
| | ITKAQWWGTIHLQINTRLAHTYKALSRQANAIKMNMEFQLANYKGNID | |
| | DKAKIKNAISETEILLNKSVEQAMKNTEKFMIKLSNSYLTKEMIPKVQDN | |
| | LKNFDLETKKTLDKFIKEKEDILGTNLSSSLRRKVSIRLNKNIAFDINDIPFS | |
| | EFDDLINQYKNEIEDYEVLNLGAEDGKIKDLSGTTSDINIGSDIEIINTSILN | |
| | LRYESNHLIDLSRYASKINIGSKVNFDPIDKNQIQLFNLESSKIEVILKNAIV | |
| | YNSMYENFSTSFWIRIPKYFNSISLNNEYTIINCMENNSGWKVSLNYGEII | |
| | WTLQDTQEIKQRVVFKYSQMINISDYINRWIFVTITNNRLNNSKIYINGRL | |
| | IDQKPISNLGNIHASNNIMFKLDGCRDTHRYIWIKYFNLFDKELNEKEIKD | |
| | LYDNQSNSGILKDFWGDYLQYDKPYYMLNLYDPNKYVDVNNVGIRGY | |
| | MYLKGPRGSVMTTNIYLNSSLYRGTKFIIKKYASGNKDNIVRNNDRVYIN | |
| | VVVKNKEYRLATNASQAGVEKILSALEIPDVGNLSQVVVMKSKNDQGIT | |
| | NKCKMNLQDNNGNDIGFIGFHQFNNIAKLVASNWYNRQIERSSRTLGCS | |
| | WEFIPVDDGWGERPLQ | |
| Hn/X-Hc/B | IEVENKDLFLISNKDSLNDINLSEEKIKPETTVFFKDKLPPQDITLSNYDFT | 41 |
| | EANSIPSISQQNILERNEELYEPIRNSLFEIKTIYVDKLTTFHFLEAQNIDESI | |
| | DSSKIRVELTDSVDEALSNPNKVYSPFKNMSNTINSIETGITSTYIFYQWLR | |
| | SIVKDFSDETGKIDVIDKSSDTLAIVPYIGPLLNIGNDIRHGDFVGAIELAGI | |
| | TALLEYVPEFTIPILVGLEVIGGELAREQVEAIVNNALDKRDQKWAEVYN | |
| | ITKAQWWGTIHLQINTRLAHTYKALSRQANAIKMNMEFQLANYKGNID | |
| | DKAKIKNAISETEILLNKSVEQAMKNTEKFMIKLSNSYLTKEMIPKVQDN | |
| | LKNFDLETKKTLDKFIKEKEDILGTNLSSSLRRKVSIRLNKNIAFDINDIPFS | |
| | EFDDLINQYKNEIEDYEVLNLGAEDGKIKDLSGTTSDINIGSDIEILNNIILN | |
| | LRYKDNNLIDLSGYGAKVEVYDGVELNDKNQFKLTSSANSKIRVTQNQN | |
| | IIFNSVFLDFSVSFWIRIPKYKNDGIQNYIHNEYTIINCMKNNSGWKISIRG | |
| | NRIIWTLIDINGKTKSVFFEYNIREDISEYINRWFFVTITNNLNNAKIYINGK | |
| | LESNTDIKDIREVIANGEIIFKLDGDIDRTQFIWMKYFSIFNTELSQSNIEER | |
| | YKIQSYSEYLKDFWGNPLMYNKEYYMFNAGNKNSYIKLKKDSPVGEILT | |
| | RSKYNQNSKYINYRDLYIGEKFIIRRKSNSQSINDDIVRKEDYIYLDFFNLN | |
| | QEWRVYTYKYFKKEEEKLFLAPISDSDEFYNTIQIKEYDEQPTYSCQLLF | |
| | KKDEESTDEIGLIGIHRFYESGIVFEEYKDYFCISKWYLKEVKRKPYNLKL | |
| | GCNWQFIPKDEGWTE | |
| Hn/X-Hc/C | IEVENKDLFLISNKDSLNDINLSEEKIKPETTVFFKDKLPPQDITLSNYDFT | 42 |
| | EANSIPSISQQNILERNEELYEPIRNSLFEIKTIYVDKLTTFHFLEAQNIDESI | |
| | DSSKIRVELTDSVDEALSNPNKVYSPFKNMSNTINSIETGITSTYIFYQWLR | |
| | SIVKDFSDETGKIDVIDKSSDTLAIVPYIGPLLNIGNDIRHGDFVGAIELAGI | |
| | TALLEYVPEFTIPILVGLEVIGGELAREQVEAIVNNALDKRDQKWAEVYN | |
| | ITKAQWWGTIHLQINTRLAHTYKALSRQANAIKMNMEFQLANYKGNID | |
| | DKAKIKNAISETEILLNKSVEQAMKNTEKFMIKLSNSYLTKEMIPKVQDN | |
| | LKNFDLETKKTLDKFIKEKEDILGTNLSSSLRRKVSIRLNKNIAFDINDIPFS | |
| | EFDDLINQYKNEIEDYEVLNLGAEDGKIKDLSGTTSDINIGSDIEINDSKIL | |
| | SLQNRKNTLVDTSGYNAEVSEEGDVQLNPIFPFDFKLGSSGEDRGKVIVT | |
| | QNENIVYNSMYESFSISFWIRINKWVSNLPGYTIIDSVKNNSGWSIGIISNF | |
| | LVFTLKQNEDSEQSINFSYDISNNAPGYNKWFFVTVTNNMMGNMKIYIN | |
| | GKLIDTIKVKELTGINFSKTITFEINKIPDTGLITSDSDNINMWIRDFYIFAK | |
| | ELDGKDINILFNSLQYTNVVKDYWGNDLRYNKEYYMVNIDYLNRYMY | |
| | ANSRQIVFNTRRNNNDFNEGYKIIIKRIRGNTNDTRVRGGDILYFDMTINN | |
| | KAYNLFMKNETMYADNHSTEDIYAIGLREQTKDINDNIIFQIQPMNNTYY | |
| | YASQIFKSNFNGENISGICSIGTYRFRLGGDWYRHNYLVPTVKQGNYASL | |
| | LESTSTHWGFVPVSE | |
| Hn/X-Hc/D | IEVENKDLFLISNKDSLNDINLSEEKIKPETTVFFKDKLPPQDITLSNYDFT | 43 |
| | EANSIPSISQQNILERNEELYEPIRNSLFEIKTIYVDKLTTFHFLEAQNIDESI | |
| | DSSKIRVELTDSVDEALSNPNKVYSPFKNMSNTINSIETGITSTYIFYQWLR | |
| | SIVKDFSDETGKIDVIDKSSDTLAIVPYIGPLLNIGNDIRHGDFVGAIELAGI | |
| | TALLEYVPEFTIPILVGLEVIGGELAREQVEAIVNNALDKRDQKWAEVYN | |
| | ITKAQWWGTIHLQINTRLAHTYKALSRQANAIKMNMEFQLANYKGNID | |
| | DKAKIKNAISETEILLNKSVEQAMKNTEKFMIKLSNSYLTKEMIPKVQDN | |
| | LKNFDLETKKTLDKFIKEKEDILGTNLSSSLRRKVSIRLNKNIAFDINDIPFS | |
| | EFDDLINQYKNEIEDYEVLNLGAEDGKIKDLSGTTSDINIGSDIEINDSKIL | |
| | SLQNKKNALVDTSGYNAEVRVGDNVQLNTIYTNDFKLSSSGDKIIVNLN | |
| | NNILYSAIYENSSVSFWIKISKDLTNSHNEYTIINSIEQNSGWKLCIRNGNIE | |
| | WILQDVNRKYKSLIFDYSESLSHTGYTNKWFFVTITNNIMGYMKLYINGE | |
| | LKQSQKIEDLDEVKLDKTIVFGIDENIDENQMLWIRDFNIFSKELSNEDINI | |
| | VYEGQILRNVIKDYWGNPLKFDTEYYIINDNYIDRYIAPESNVLVLVQYP | |
| | DRSKLYTGNPITIKSVSDKNPYSRILNGDNIILHMLYNSRKYMIIRDTDTIY | |
| | ATQGGECSQNCVYALKLQSNLGNYGIGIFSIKNIVSKNKYCSQIFSSFREN | |
| | TMLLADIYKPWRFSFKNAYTPVAVTNYETKLLSTSSFWKFISRDPGWVE | |
| Hn/X-Hc/E | IEVENKDLFLISNKDSLNDINLSEEKIKPETTVFFKDKLPPQDITLSNYDFT | 44 |
| | EANSIPSISQQNILERNEELYEPIRNSLFEIKTIYVDKLTTFHFLEAQNIDESI | |
| | DSSKIRVELTDSVDEALSNPNKVYSPFKNMSNTINSIETGITSTYIFYQWLR | |
| | SIVKDFSDETGKIDVIDKSSDTLAIVPYIGPLLNIGNDIRHGDFVGAIELAGI | |
| | TALLEYVPEFTIPILVGLEVIGGELAREQVEAIVNNALDKRDQKWAEVYN | |
| | ITKAQWWGTIHLQINTRLAHTYKALSRQANAIKMNMEFQLANYKGNID | |
| | DKAKIKNAISETEILLNKSVEQAMKNTEKFMIKLSNSYLTKEMIPKVQDN | |
| | LKNFDLETKKTLDKFIKEKEDILGTNLSSSLRRKVSIRLNKNIAFDINDIPFS | |
| | EFDDLINQYKNEIEDYEVLNLGAEDGKIKDLSGTTSDINIGSDIEIKSSSVL | |
| | NMRYKNDKYVDTSGYDSNININGDVYKYPTNKNQFGIYNDKLSEVNISQ | |
| | NDYIIYDNKYKNFSISFWVRIPNYDNKIVNVNNEYTIINCMRDNNSGWKV | |
| | SLNHNEIIWTLQDNAGINQKLAFNYGNANGISDYINKWIFVTITNDRLGD | |
| | SKLYINGNLIDQKSILNLGNIHVSDNILFKIVNCSYTRYIGIRYFNIFDKELD | |
| | ETEIQTLYSNEPNTNILKDFWGNYLLYDKEYYLLNVLKPNNFIDRRKDST | |
| | LSINNIRSTILLANRLYSGIKVKIQRVNNSSTNDNLVRKNDQVYINFVASK | |
| | THLFPLYADTATTNKEKTIKISSSGNRFNQVVVMNSVGNNCTMNFKNNN | |
| | GNNIGLLGFKADTVVASTWYYTHMRDHTNSNGCFWNFISEEHGWQEK | |
| Hn/X-Hc/F | IEVENKDLFLISNKDSLNDINLSEEKIKPETTVFFKDKLPPQDITLSNYDFT | 45 |
| | EANSIPSISQQNILERNEELYEPIRNSLFEIKTIYVDKLTTFHFLEAQNIDESI | |
| | DSSKIRVELTDSVDEALSNPNKVYSPFKNMSNTINSIETGITSTYIFYQWLR | |
| | SIVKDFSDETGKIDVIDKSSDTLAIVPYIGPLLNIGNDIRHGDFVGAIELAGI | |
| | TALLEYVPEFTIPILVGLEVIGGELAREQVEAIVNNALDKRDQKWAEVYN | |
| | ITKAQWWGTIHLQINTRLAHTYKALSRQANAIKMNMEFQLANYKGNID | |
| | DKAKIKNAISETEILLNKSVEQAMKNTEKFMIKLSNSYLTKEMIPKVQDN | |
| | LKNFDLETKKTLDKFIKEKEDILGTNLSSSLRRKVSIRLNKNIAFDINDIPFS | |
| | EFDDLINQYKNEIEDYEVLNLGAEDGKIKDLSGTTSDINIGSDIEIKDNSIL | |
| | DMRYENNKFIDISGYGSNISINGDVYIYSTNRNQFGIYSSKPSEVNIAQNN | |
| | DIIYNGRYQNFSISFWVRIPKYFNKVNLNNEYTIIDCIRNNNSGWKISLNY | |
| | NKIIWTLQDTAGNNQKLVFNYTQMISISDYINKWIFVTITNNRLGNSRIYI | |
| | NGNLIDEKSISNLGDIHVSDNILFKIVGCNDTRYVGIRYFKVFDTELGKTEI | |
| | ETLYSDEPDPSILKDFWGNYLLYNKRYYLLNLLRTDKSITQNSNFLNINQ | |
| | QRGVYQKPNIFSNTRLYTGVEVIIRKNGSTDISNTDNFVRKNDLAYINVV | |
| | DRDVEYRLYADISIAKPEKIIKLIRTSNSNNSLGQIIVMDSIGNNCTMNFQN | |
| | NNGGNIGLLGFHSNNLVASSWYYNNIRKNTSSNGCFWSFISKEHGWQEN | |
| Hn/X-Hc/G | IEVENKDLFLISNKDSLNDINLSEEKIKPETTVFFKDKLPPQDITLSNYDFT | 46 |
| | EANSIPSISQQNILERNEELYEPIRNSLFEIKTIYVDKLTTFHFLEAQNIDESI | |
| | DSSKIRVELTDSVDEALSNPNKVYSPFKNMSNTINSIETGITSTYIFYQWLR | |
| | SIVKDFSDETGKIDVIDKSSDTLAIVPYIGPLLNIGNDIRHGDFVGAIELAGI | |
| | TALLEYVPEFTIPILVGLEVIGGELAREQVEAIVNNALDKRDQKWAEVYN | |
| | ITKAQWWGTIHLQINTRLAHTYKALSRQANAIKMNMEFQLANYKGNID | |
| | DKAKIKNAISETEILLNKSVEQAMKNTEKFMIKLSNSYLTKEMIPKVQDN | |
| | LKNFDLETKKTLDKFIKEKEDILGTNLSSSLRRKVSIRLNKNIAFDINDIPFS | |
| | EFDDLINQYKNEIEDYEVLNLGAEDGKIKDLSGTTSDINIGSDIEISSNAILS | |
| | LSYRGGRLIDSSGYGATMNVGSDVIFNDIGNGQFKLNNSENSNITAHQSK | |
| | FVVYDSMFDNFSINFWVRTPKYNNNDIQTYLQNEYTIISCIKNDSGWKVS | |
| | IKGNRIIWTLIDVNAKSKSIFFEYSIKDNISDYINKWFSITITNDRLGNANIYI | |
| | NGSLKKSEKILNLDRINSSNDIDFKLINCTDTTKFVWIKDFNIFGRELNATE | |
| | VSSLYWIQSSTNTLKDFWGNPLRYDTQYYLFNQGMQNIYIKYFSKASMG | |
| | ETAPRTNFNNAAINYQNLYLGLRFIIKKASNSRNINNDNIVREGDYIYLNI | |
| | DNISDESYRVYVLVNSKEIQTQLFLAPINDDPTFYDVLQIKKYYEKTTYN | |
| | CQILCEKDTKTFGLFGIGKFVKDYGYVWDTYDNYFCISQWYLRRISENIN | |
| | KLRLGCNWQFIPVDEGWTE | |
| Hn/X-Hc/H | IEVENKDLFLISNKDSLNDINLSEEKIKPETTVFFKDKLPPQDITLSNYDFT | 47 |
| | EANSIPSISQQNILERNEELYEPIRNSLFEIKTIYVDKLTTFHFLEAQNIDESI | |
| | DSSKIRVELTDSVDEALSNPNKVYSPFKNMSNTINSIETGITSTYIFYQWLR | |
| | SIVKDFSDETGKIDVIDKSSDTLAIVPYIGPLLNIGNDIRHGDFVGAIELAGI | |
| | TALLEYVPEFTIPILVGLEVIGGELAREQVEAIVNNALDKRDQKWAEVYN | |
| | ITKAQWWGTIHLQINTRLAHTYKALSRQANAIKMNMEFQLANYKGNID | |
| | DKAKIKNAISETEILLNKSVEQAMKNTEKFMIKLSNSYLTKEMIPKVQDN | |
| | LKNFDLETKKTLDKFIKEKEDILGTNLSSSLRRKVSIRLNKNIAFDINDIPFS | |
| | EFDDLINQYKNEIEDYEVLNLGAEDGKIKDLSGTTSDINIGSDIELKYNCIL | |
| | NIKYEMDRDKLVDSSGYRSRINIGTGVKFSEIDKNQVQLSNLESSKIEVIL | |
| | NNGVIYNSMYENFSTSFWIRIPKYFRNINNEYKIISCMQNNSGWEVSLNFS | |
| | NMNSKIIWTLQDTEGIKKTVVFQYTQNINISDYINRWIFVTITNNRLSNSKI | |
| | YINGRLINEESISDLGNIHASNNIMFKLDGCRDPHRYIWIKYFNLFDKELN | |
| | KKEIKDLYDNQSNSGILKDFWGDYLQYDKPYYMLNLYDPNKYLDVNNV | |
| | GIRGYMYLKGPRGRIVTTNIYLNSTLYMGTKFIIKKYASGNKDNIVRNND | |
| | RVYINVVVKNKEYRLATNASQAGVEKILSAVEIPDVGNLSQVVVMKSEN | |
| | DQGIRNKCKMNLQDNNGNDIGFIGFHQFNNIAKLVASNWYNRQIGKASR | |
| | TFGCSWEFIPVDDGWGESSL | |
| ^{ci}LC/En | MVTINDLHYSDPIDEDNIINMRIPLYDLEVDDQFINHNVPDLKAFQVFPNV | 48 |
| | WVVPERYTFYSTMKNLDAPANPSRSSYYDPTYLQSDAEKEVFLQQMILL | |
| | FKRINSTQEGQQFLNLLSRSIPVPYESNGDVAMGTTQVIKQMDDKGNVL | |
| | KHRRAHIIIYGPGPDLMAKGSKALTKSRETGRGCMAEIYFSPMYHKTYST | |
| | KLTNKNSLVDKSVQEFVPDPAVTLIHQLCHGLHALYGIDLGNVGSWEFN | |
| | SNPNSLFSSWFSSKEAVNFEEVMTFGGEDVKVIKSEIDKKIPGILNLIKTTV | |
| | EPIINKITDPHDEMLQCLQSKYPSLKGTLGQFFFDDTQLEKDIRDLWMVM | |
| | NETMFAENLKALTAARFLVPKVENIVQVDILSPNVYTIDKGFNHLSKGFK | |
| | GQSVSQSYFRKISALARGAVVRA | |
| Hn/En-Hc/A | IEILEDDLFIMSSKDSFTDTDFSEPSVGPVSYKAKKGADTILDSTLSNYDFS | 49 |
| | KEINFTSTVPIITVEDPLETDEDVPVISEDRTVYVDDYTTFHFLEAQKIGKE | |
| | VVPTQTKVVFTTNMEEALFDSKKVYTVFENTASRINEAGTGIANGMMFY | |
| | QWLKGIVQDFTEEATQKDTFDKISDVTMIVPYLGNILNIGNDIRKGDFMG | |
| | AVELGGVTILLEAIPELTLPVLIGLTIIEDELEKEQVSQTVYNVLDKRDEK | |
| | WEEVYGFVKQQWWWMVHTQFETRILHAYQALNHQVEAIKANMTYQL | |
| | ANYRGNQEDKELLEKAIDDTLQSLYYAVDQAMHNIKRFLIQSSKSYLLN | |
| | QMLPKTKEQLLAFDQQTLRNVNDFINKNQGVLGESLAKDLKKKVEKRL | |
| | TSLPVFNLEDLPISEFEDLIHSHEIDIQDSEVLNIGVNNGKIQDLSGENTPLT | |
| | LGENLHIINTSILNLRYESNHLIDLSRYASKINIGSKVNFDPIDKNQIQLFNL | |
| | ESSKIEVILKNAIVYNSMYENFSTSFWIRIPKYFNSISLNNEYTIINCMENNS | |
| | GWKVSLNYGEIIWTLQDTQEIKQRVVFKYSQMINISDYINRWIFVTITNNR | |
| | LNNSKIYINGRLIDQKPISNLGNIHASNNIMFKLDGCRDTHRYIWIKYFNL | |
| | FDKELNEKEIKDLYDNQSNSGILKDFWGDYLQYDKPYYMLNLYDPNKY | |
| | VDVNNVGIRGYMYLKGPRGSVMTTNIYLNSSLYRGTKFIIKKYASGNKD | |
| | NIVRNNDRVYINVVVKNKEYRLATNASQAGVEKILSALEIPDVGNLSQV | |
| | VVMKSKNDQGITNKCKMNLQDNNGNDIGFIGFHQFNNIAKLVASNWYN | |
| | RQIERSSRTLGCSWEFIPVDDGWGERPLQ | |
| Hn/En-Hc/B | IEILEDDLFIMSSKDSFTDTDFSEPSVGPVSYKAKKGADTILDSTLSNYDFS | 50 |
| | KEINFTSTVPIITVEDPLETDEDVPVISEDRTVYVDDYTTFHFLEAQKIGKE | |
| | VVPTQTKVVFTTNMEEALFDSKKVYTVFENTASRINEAGTGIANGMMFY | |
| | QWLKGIVQDFTEEATQKDTFDKISDVTMIVPYLGNILNIGNDIRKGDFMG | |
| | AVELGGVTILLEAIPELTLPVLIGLTIIEDELEKEQVSQTVYNVLDKRDEK | |
| | WEEVYGFVKQQWWWMVHTQFETRILHAYQALNHQVEAIKANMTYQL | |
| | ANYRGNQEDKELLEKAIDDTLQSLYYAVDQAMHNIKRFLIQSSKSYLLN | |
| | QMLPKTKEQLLAFDQQTLRNVNDFINKNQGVLGESLAKDLKKKVEKRL | |
| | TSLPVFNLEDLPISEFEDLIHSHEIDIQDSEVLNIGVNNGKIQDLSGENTPLT | |
| | LGENLHILNNIILNLRYKDNNLIDLSGYGAKVEVYDGVELNDKNQFKLTS | |
| | SANSKIRVTQNQNIIFNSVFLDFSVSFWIRIPKYKNDGIQNYIHNEYTIINC | |
| | MKNNSGWKISIRGNRIIWTLIDINGKTKSVFFEYNIREDISEYINRWFFVTI | |
| | TNNLNNAKIYINGKLESNTDIKDIREVIANGEIIFKLDGDIDRTQFIWMKYF | |
| | SIFNTELSQSNIEERYKIQSYSEYLKDFWGNPLMYNKEYYMFNAGNKNS | |
| | YIKLKKDSPVGEILTRSKYNQNSKYINYRDLYIGEKFIIRRKSNSQSINDDI | |
| | VRKEDYIYLDFFNLNQEWRVYTYKYFKKEEEKLFLAPISDSDEFYNTIQI | |
| | KEYDEQPTYSCQLLFKKDEESTDEIGLIGIHRFYESGIVFEEYKDYFCISK | |
| | WYLKEVKRKPYNLKLGCNWQFIPKDEGWTE | |
| Hn/En-Hc/C | IEILEDDLFIMSSKDSFTDTDFSEPSVGPVSYKAKKGADTILDSTLSNYDFS | 51 |
| | KEINFTSTVPIITVEDPLETDEDVPVISEDRTVYVDDYTTFHFLEAQKIGKE | |
| | VVPTQTKVVFTTNMEEALFDSKKVYTVFENTASRINEAGTGIANGMMFY | |
| | QWLKGIVQDFTEEATQKDTFDKISDVTMIVPYLGNILNIGNDIRKGDFMG | |
| | AVELGGVTILLEAIPELTLPVLIGLTIIEDELEKEQVSQTVYNVLDKRDEK | |
| | WEEVYGFVKQQWWWMVHTQFETRILHAYQALNHQVEAIKANMTYQL | |
| | ANYRGNQEDKELLEKAIDDTLQSLYYAVDQAMHNIKRFLIQSSKSYLLN | |
| | QMLPKTKEQLLAFDQQTLRNVNDFINKNQGVLGESLAKDLKKKVEKRL | |
| | TSLPVFNLEDLPISEFEDLIHSHEIDIQDSEVLNIGVNNGKIQDLSGENTPLT | |
| | LGENLHINDSKILSLQNRKNTLVDTSGYNAEVSEEGDVQLNPIFPFDFKLG | |
| | SSGEDRGKVIVTQNENIVYNSMYESFSISFWIRINKWVSNLPGYTIIDSVK | |
| | NNSGWSIGIISNFLVFTLKQNEDSEQSINFSYDISNNAPGYNKWFFVTVTN | |
| | NMMGNMKIYINGKLIDTIKVKELTGINFSKTITFEINKIPDTGLITSDSDNIN | |
| | MWIRDFYIFAKELDGKDINILFNSLQYTNVVKDYWGNDLRYNKEYYMV | |
| | NIDYLNRYMYANSRQIVFNTRRNNNDFNEGYKIIIKRIRGNTNDTRVRGG | |
| | DILYFDMTINNKAYNLFMKNETMYADNHSTEDIYAIGLREQTKDINDNII | |
| | FQIQPMNNTYYYASQIFKSNFNGENISGICSIGTYRFRLGGDWYRHNYLV | |
| | PTVKQGNYASLLESTSTHWGFVPVSE | |
| Hn/En-Hc/D | IEILEDDLFIMSSKDSFTDTDFSEPSVGPVSYKAKKGADTILDSTLSNYDFS | 52 |
| | KEINFTSTVPIITVEDPLETDEDVPVISEDRTVYVDDYTTFHFLEAQKIGKE | |
| | VVPTQTKVVFTTNMEEALFDSKKVYTVFENTASRINEAGTGIANGMMFY | |
| | QWLKGIVQDFTEEATQKDTFDKISDVTMIVPYLGNILNIGNDIRKGDFMG | |
| | AVELGGVTILLEAIPELTLPVLIGLTIIEDELEKEQVSQTVYNVLDKRDEK | |
| | WEEVYGFVKQQWWWMVHTQFETRILHAYQALNHQVEAIKANMTYQL | |
| | ANYRGNQEDKELLEKAIDDTLQSLYYAVDQAMHNIKRFLIQSSKSYLLN | |
| | QMLPKTKEQLLAFDQQTLRNVNDFINKNQGVLGESLAKDLKKKVEKRL | |
| | TSLPVFNLEDLPISEFEDLIHSHEIDIQDSEVLNIGVNNGKIQDLSGENTPLT | |
| | LGENLHINDSKILSLQNKKNALVDTSGYNAEVRVGDNVQLNTIYTNDFK | |
| | LSSSGDKIIVNLNNNILYSAIYENSSVSFWIKISKDLTNSHNEYTIINSIEQN | |
| | SGWKLCIRNGNIEWILQDVNRKYKSLIFDYSESLSHTGYTNKWFFVTITN | |
| | NIMGYMKLYINGELKQSQKIEDLDEVKLDKTIVFGIDENIDENQMLWIRD | |
| | FNIFSKELSNEDINIVYEGQILRNVIKDYWGNPLKFDTEYYIINDNYIDRYI | |
| | APESNVLVLVQYPDRSKLYTGNPITIKSVSDKNPYSRILNGDNIILHMLYN | |
| | SRKYMIIRDTDTIYATQGGECSQNCVYALKLQSNLGNYGIGIFSIKNIVSK | |
| | NKYCSQIFSSFRENTMLLADIYKPWRFSFKNAYTPVAVTNYETKLLSTSS | |
| | FWKFISRDPGWVE | |
| Hn/En-Hc/E | IEILEDDLFIMSSKDSFTDTDFSEPSVGPVSYKAKKGADTILDSTLSNYDFS | 53 |
| | KEINFTSTVPIITVEDPLETDEDVPVISEDRTVYVDDYTTFHFLEAQKIGKE | |
| | VVPTQTKVVFTTNMEEALFDSKKVYTVFENTASRINEAGTGIANGMMFY | |
| | QWLKGIVQDFTEEATQKDTFDKISDVTMIVPYLGNILNIGNDIRKGDFMG | |
| | AVELGGVTILLEAIPELTLPVLIGLTIIEDELEKEQVSQTVYNVLDKRDEK | |
| | WEEVYGFVKQQWWWMVHTQFETRILHAYQALNHQVEAIKANMTYQL | |
| | ANYRGNQEDKELLEKAIDDTLQSLYYAVDQAMHNIKRFLIQSSKSYLLN | |
| | QMLPKTKEQLLAFDQQTLRNVNDFINKNQGVLGESLAKDLKKKVEKRL | |
| | TSLPVFNLEDLPISEFEDLIHSHEIDIQDSEVLNIGVNNGKIQDLSGENTPLT | |
| | LGENLHIKSSSVLNMRYKNDKYVDTSGYDSNININGDVYKYPTNKNQFG | |
| | IYNDKLSEVNISQNDYIIYDNKYKNFSISFWVRIPNYDNKIVNVNNEYTIIN | |
| | CMRDNNSGWKVSLNHNEIIWTLQDNAGINQKLAFNYGNANGISDYINK | |
| | WIFVTITNDRLGDSKLYINGNLIDQKSILNLGNIHVSDNILFKIVNCSYTRY | |
| | IGIRYFNIFDKELDETEIQTLYSNEPNTNILKDFWGNYLLYDKEYYLLNVL | |
| | KPNNFIDRRKDSTLSINNIRSTILLANRLYSGIKVKIQRVNNSSTNDNLVRK | |
| | NDQVYINFVASKTHLFPLYADTATTNKEKTIKISSSGNRFNQVVVMNSVG | |
| | NNCTMNFKNNNGNNIGLLGFKADTVVASTWYYTHMRDHTNSNGCFWN | |
| | FISEEHGWQEK | |
| Hn/En-Hc/F | IEILEDDLFIMSSKDSFTDTDFSEPSVGPVSYKAKKGADTILDSTLSNYDFS | 54 |
| | KEINFTSTVPIITVEDPLETDEDVPVISEDRTVYVDDYTTFHFLEAQKIGKE | |
| | VVPTQTKVVFTTNMEEALFDSKKVYTVFENTASRINEAGTGIANGMMFY | |
| | QWLKGIVQDFTEEATQKDTFDKISDVTMIVPYLGNILNIGNDIRKGDFMG | |
| | AVELGGVTILLEAIPELTLPVLIGLTIIEDELEKEQVSQTVYNVLDKRDEK | |
| | WEEVYGFVKQQWWWMVHTQFETRILHAYQALNHQVEAIKANMTYQL | |
| | ANYRGNQEDKELLEKAIDDTLQSLYYAVDQAMHNIKRFLIQSSKSYLLN | |
| | QMLPKTKEQLLAFDQQTLRNVNDFINKNQGVLGESLAKDLKKKVEKRL | |
| | TSLPVFNLEDLPISEFEDLIHSHEIDIQDSEVLNIGVNNGKIQDLSGENTPLT | |
| | LGENLHIKDNSILDMRYENNKFIDISGYGSNISINGDVYIYSTNRNQFGIYS | |
| | SKPSEVNIAQNNDIIYNGRYQNFSISFWVRIPKYFNKVNLNNEYTIIDCIRN | |
| | NNSGWKISLNYNKIIWTLQDTAGNNQKLVFNYTQMISISDYINKWIFVTIT | |
| | NNRLGNSRIYINGNLIDEKSISNLGDIHVSDNILFKIVGCNDTRYVGIRYFK | |
| | VFDTELGKTEIETLYSDEPDPSILKDFWGNYLLYNKRYYLLNLLRTDKSIT | |
| | QNSNFLNINQQRGVYQKPNIFSNTRLYTGVEVIIRKNGSTDISNTDNFVRK | |
| | NDLAYINVVDRDVEYRLYADISIAKPEKIIKLIRTSNSNNSLGQIIVMDSIG | |
| | NNCTMNFQNNNGGNIGLLGFHSNNLVASSWYYNNIRKNTSSNGCFWSFI | |
| | SKEHGWQEN | |
| Hn/En-Hc/G | IEILEDDLFIMSSKDSFTDTDFSEPSVGPVSYKAKKGADTILDSTLSNYDFS | 55 |
| | KEINFTSTVPIITVEDPLETDEDVPVISEDRTVYVDDYTTFHFLEAQKIGKE | |
| | VVPTQTKVVFTTNMEEALFDSKKVYTVFENTASRINEAGTGIANGMMFY | |
| | QWLKGIVQDFTEEATQKDTFDKISDVTMIVPYLGNILNIGNDIRKGDFMG | |
| | AVELGGVTILLEAIPELTLPVLIGLTIIEDELEKEQVSQTVYNVLDKRDEK | |
| | WEEVYGFVKQQWWWMVHTQFETRILHAYQALNHQVEAIKANMTYQL | |
| | ANYRGNQEDKELLEKAIDDTLQSLYYAVDQAMHNIKRFLIQSSKSYLLN | |
| | QMLPKTKEQLLAFDQQTLRNVNDFINKNQGVLGESLAKDLKKKVEKRL | |
| | TSLPVFNLEDLPISEFEDLIHSHEIDIQDSEVLNIGVNNGKIQDLSGENTPLT | |
| | LGENLHISSNAILSLSYRGGRLIDSSGYGATMNVGSDVIFNDIGNGQFKLN | |
| | NSENSNITAHQSKFVVYDSMFDNFSINFWVRTPKYNNNDIQTYLQNEYTI | |
| | ISCIKNDSGWKVSIKGNRIIWTLIDVNAKSKSIFFEYSIKDNISDYINKWFSI | |
| | TITNDRLGNANIYINGSLKKSEKILNLDRINSSNDIDFKLINCTDTTKFVWI | |
| | KDFNIFGRELNATEVSSLYWIQSSTNTLKDFWGNPLRYDTQYYLFNQGM | |
| | QNIYIKYFSKASMGETAPRTNFNNAAINYQNLYLGLRFIIKKASNSRNINN | |
| | DNIVREGDYIYLNIDNISDESYRVYVLVNSKEIQTQLFLAPINDDPTFYDV | |
| | LQIKKYYEKTTYNCQILCEKDTKTFGLFGIGKFVKDYGYVWDTYDNYFC | |
| | ISQWYLRRISENINKLRLGCNWQFIPVDEGWTE | |
| Hn/En-Hc/H | IEILEDDLFIMSSKDSFTDTDFSEPSVGPVSYKAKKGADTILDSTLSNYDFS | 56 |
| | KEINFTSTVPIITVEDPLETDEDVPVISEDRTVYVDDYTTFHFLEAQKIGKE | |
| | VVPTQTKVVFTTNMEEALFDSKKVYTVFENTASRINEAGTGIANGMMFY | |
| | QWLKGIVQDFTEEATQKDTFDKISDVTMIVPYLGNILNIGNDIRKGDFMG | |
| | AVELGGVTILLEAIPELTLPVLIGLTIIEDELEKEQVSQTVYNVLDKRDEK | |
| | WEEVYGFVKQQWWWMVHTQFETRILHAYQALNHQVEAIKANMTYQL | |
| | ANYRGNQEDKELLEKAIDDTLQSLYYAVDQAMHNIKRFLIQSSKSYLLN | |
| | QMLPKTKEQLLAFDQQTLRNVNDFINKNQGVLGESLAKDLKKKVEKRL | |
| | TSLPVFNLEDLPISEFEDLIHSHEIDIQDSEVLNIGVNNGKIQDLSGENTPLT | |
| | LGENLHLKYNCILNIKYEMDRDKLVDSSGYRSRINIGTGVKFSEIDKNQV | |
| | QLSNLESSKIEVILNNGVIYNSMYENFSTSFWIRIPKYFRNINNEYKIISCM | |
| | QNNSGWEVSLNFSNMNSKIIWTLQDTEGIKKTVVFQYTQNINISDYINRW | |
| | IFVTITNNRLSNSKIYINGRLINEESISDLGNIHASNNIMFKLDGCRDPHRYI | |
| | WIKYFNLFDKELNKKEIKDLYDNQSNSGILKDFWGDYLQYDKPYYMLN | |
| | LYDPNKYLDVNNVGIRGYMYLKGPRGRIVTTNIYLNSTLYMGTKFIIKKY | |
| | ASGNKDNIVRNNDRVYINVVVKNKEYRLATNASQAGVEKILSAVEIPDV | |
| | GNLSQVVVMKSENDQGIRNKCKMNLQDNNGNDIGFIGFHQFNNIAKLV | |
| | ASNWYNRQIGKASRTFGCSWEFIPVDDGWGESSL | |
| ^{ci}LC/PMP1 | MLQIRVFNYNDPIDGENIVELRYHNRSPVKAFQIVDGIWIIPERYNFTNDT | 104 |
| | KKVPDDRALTILEDEVFAVRENDYLTTDVNEKNSFLNNITKLFKRINSSNI | |
| | GNQLLNYISTSVPYPVVSTNSIKARDYNTIKFDSIDGRRITKSANVLIYGPS | |
| | MKNLLDKQTRAINGEEAKNGIGCLSDIIFSPNYLSVQTVSSSRFVEDPASS | |
| | LTHQLIHALHNLYGIQYPGEEKFKFGGFIDKLLGTRECIDYEEVLTYGGK | |
| | DSEIIRKKIDKSLYPDDFVNKYGEMYKRIKGSNPYYPDEKKLKQSFLNRM | |
| | NPFDQNGTFDTKEFKNHLMDLWFGLNESEFAKEKKILVAKHFITKQINPK | |
| | YTELTNDVYTEDKGFVNGQSIDNQNFKIIDDLISKKVKL | |
| Hn/PMP1-Hc/A | IDVNKEDLYFISDKEGFENIDFSEPEIRYDSNVTTATTSSFTDHFLVNRTFN | 105 |
| | DSDRFPPVELEYAIEPAEIVDNTIMPDIDQKSEISLDNLTTFHYLNAQKMD | |
| | LGFDSSKEQLKMVTSIEESLLDSKKVYTPFTRTAHSVNERISGIAESYLFY | |
| | QWLKTVINDFTDELNQKSNTDKVADISWIIPYVGPALNIGLDLSHGDFTK | |
| | AFEDLGVSILFAIAPEFATISLVALSIYENIEEDSQKEKVINKVENTLARRIE | |
| | KWHQVYAFMVAQWWGMVHTQIDTRIHQMYESLSHQIIAIKANMEYQLS | |
| | HYKGPDNDKLLLKDYIYEAEIALNTSANRAMKNIERFMIESSISYLKNNLI | |
| | PSVVENLKKFDADTKKNLDQFIDKNSSVLGSDLHILKSQVDLELNPTTKV | |
| | AFNIQSIPDFDINALIDRLGIQIINTSILNLRYESNHLIDLSRYASKINIGSKV | |
| | NFDPIDKNQIQLFNLESSKIEVILKNAIVYNSMYENFSTSFWIRIPKYFNSIS | |
| | LNNEYTIINCMENNSGWKVSLNYGEIIWTLQDTQEIKQRVVFKYSQMINI | |
| | SDYINRWIFVTITNNRLNNSKIYINGRLIDQKPISNLGNIHASNNIMFKLDG | |
| | CRDTHRYIWIKYFNLFDKELNEKEIKDLYDNQSNSGILKDFWGDYLQYD | |
| | KPYYMLNLYDPNKYVDVNNVGIRGYMYLKGPRGSVMTTNIYLNSSLYR | |
| | GTKFIIKKYASGNKDNIVRNNDRVYINVVVKNKEYRLATNASQAGVEKI | |
| | LSALEIPDVGNLSQVVVMKSKNDQGITNKCKMNLQDNNGNDIGFIGFHQ | |
| | FNNIAKLVASNWYNRQIERSSRTLGCSWEFIPVDDGWGERPLQ | |
| Hn/PMP1-Hc/B | IDVNKEDLYFISDKEGFENIDFSEPEIRYDSNVTTATTSSFTDHFLVNRTFN | 106 |
| | DSDRFPPVELEYAIEPAEIVDNTIMPDIDQKSEISLDNLTTFHYLNAQKMD | |
| | LGFDSSKEQLKMVTSIEESLLDSKKVYTPFTRTAHSVNERISGIAESYLFY | |
| | QWLKTVINDFTDELNQKSNTDKVADISWIIPYVGPALNIGLDLSHGDFTK | |
| | AFEDLGVSILFAIAPEFATISLVALSIYENIEEDSQKEKVINKVENTLARRIE | |
| | KWHQVYAFMVAQWWGMVHTQIDTRIHQMYESLSHQIIAIKANMEYQLS | |
| | HYKGPDNDKLLLKDYIYEAEIALNTSANRAMKNIERFMIESSISYLKNNLI | |
| | PSVVENLKKFDADTKKNLDQFIDKNSSVLGSDLHILKSQVDLELNPTTKV | |
| | AFNIQSIPDFDINALIDRLGIQILNNIILNLRYKDNNLIDLSGYGAKVEVYD | |
| | GVELNDKNQFKLTSSANSKIRVTQNQNIIFNSVFLDFSVSFWIRIPKYKND | |
| | GIQNYIHNEYTIINCMKNNSGWKISIRGNRIIWTLIDINGKTKSVFFEYNIR | |
| | EDISEYINRWFFVTITNNLNNAKIYINGKLESNTDIKDIREVIANGEIIFKLD | |
| | GDIDRTQFIWMKYFSIFNTELSQSNIEERYKIQSYSEYLKDFWGNPLMYN | |
| | KEYYMFNAGNKNSYIKLKKDSPVGEILTRSKYNQNSKYINYRDLYIGEKF | |
| | IIRRKSNSQSINDDIVRKEDYIYLDFFNLNQEWRVYTYKYFKKEEEKLFLA | |
| | PISDSDEFYNTIQIKEYDEQPTYSCQLLFKKDEESTDEIGLIGIHRFYESGIV | |
| | FEEYKDYFCISKWYLKEVKRKPYNLKLGCNWQFIPKDEGWTE | |
| Hn/PMP1-Hc/C | IDVNKEDLYFISDKEGFENIDFSEPEIRYDSNVTTATTSSFTDHFLVNRTFN | 107 |
| | DSDRFPPVELEYAIEPAEIVDNTIMPDIDQKSEISLDNLTTFHYLNAQKMD | |
| | LGFDSSKEQLKMVTSIEESLLDSKKVYTPFTRTAHSVNERISGIAESYLFY | |
| | QWLKTVINDFTDELNQKSNTDKVADISWIIPYVGPALNIGLDLSHGDFTK | |
| | AFEDLGVSILFAIAPEFATISLVALSIYENIEEDSQKEKVINKVENTLARRIE | |
| | KWHQVYAFMVAQWWGMVHTQIDTRIHQMYESLSHQIIAIKANMEYQLS | |
| | HYKGPDNDKLLLKDYIYEAEIALNTSANRAMKNIERFMIESSISYLKNNLI | |
| | PSVVENLKKFDADTKKNLDQFIDKNSSVLGSDLHILKSQVDLELNPTTKV | |
| | AFNIQSIPDFDINALIDRLGIQINDSKILSLQNRKNTLVDTSGYNAEVSEEG | |
| | DVQLNPIFPFDFKLGSSGEDRGKVIVTQNENIVYNSMYESFSISFWIRINK | |
| | WVSNLPGYTIIDSVKNNSGWSIGIISNFLVFTLKQNEDSEQSINFSYDISNN | |
| | APGYNKWFFVTVTNNMMGNMKIYINGKLIDTIKVKELTGINFSKTITFEI | |
| | NKIPDTGLITSDSDNINMWIRDFYIFAKELDGKDINILFNSLQYTNVVKDY | |
| | WGNDLRYNKEYYMVNIDYLNRYMYANSRQIVFNTRRNNNDFNEGYKIII | |
| | KRIRGNTNDTRVRGGDILYFDMTINNKAYNLFMKNETMYADNHSTEDIY | |
| | AIGLREQTKDINDNIIFQIQPMNNTYYYASQIFKSNFNGENISGICSIGTYRF | |
| | RLGGDWYRHNYLVPTVKQGNYASLLESTSTHWGFVPVSE | |
| Hn/PMP1-Hc/D | IDVNKEDLYFISDKEGFENIDFSEPEIRYDSNVTTATTSSFTDHFLVNRTFN | 108 |
| | DSDRFPPVELEYAIEPAEIVDNTIMPDIDQKSEISLDNLTTFHYLNAQKMD | |
| | LGFDSSKEQLKMVTSIEESLLDSKKVYTPFTRTAHSVNERISGIAESYLFY | |
| | QWLKTVINDFTDELNQKSNTDKVADISWIIPYVGPALNIGLDLSHGDFTK | |
| | AFEDLGVSILFAIAPEFATISLVALSIYENIEEDSQKEKVINKVENTLARRIE | |
| | KWHQVYAFMVAQWWGMVHTQIDTRIHQMYESLSHQIIAIKANMEYQLS | |
| | HYKGPDNDKLLLKDYIYEAEIALNTSANRAMKNIERFMIESSIYLKNNLI | |
| | PSVVENLKKFDADTKKNLDQFIDKNSSVLGSDLHILKSQVDLELNPTTKV | |
| | AFNIQSIPDFDINALIDRLGIQINDSKILSLQNKKNALVDTSGYNAEVRVG | |
| | DNVQLNTIYTNDFKLSSSGDKIIVNLNNNILYSAIYENSSVSFWIKISKDLT | |
| | NSHNEYTIINSIEQNSGWKLCIRNGNIEWILQDVNRKYKSLIFDYSESLSHT | |
| | GYTNKWFFVTITNNIMGYMKLYINGELKQSQKIEDLDEVKLDKTIVFGID | |
| | ENIDENQMLWIRDFNIFSKELSNEDINIVYEGQILRNVIKDYWGNPLKFDT | |
| | EYYIINDNYIDRYIAPESNVLVLVQYPDRSKLYTGNPITIKSVSDKNPYSRI | |
| | LNGDNIILHMLYNSRKYMIIRDTDTIYATQGGECSQNCVYALKLQSNLGN | |
| | YGIGIFSIKNIVSKNKYCSQIFSSFRENTMLLADIYKPWRFSFKNAYTPVA | |
| | VTNYETKLLSTSSFWKFISRDPGWVE | |
| Hn/PMP1-Hc/E | IDVNKEDLYFISDKEGFENIDFSEPEIRYDSNVTTATTSSFTDHFLVNRTFN | 109 |
| | DSDRFPPVELEYAIEPAEIVDNTIMPDIDQKSEISLDNLTTFHYLNAQKMD | |
| | LGFDSSKEQLKMVTSIEESLLDSKKVYTPFTRTAHSVNERISGIAESYLFY | |
| | QWLKTVINDFTDELNQKSNTDKVADISWIIPYVGPALNIGLDLSHGDFTK | |
| | AFEDLGVSILFAIAPEFATISLVALSIYENIEEDSQKEKVINKVENTLARRIE | |
| | KWHQVYAFMVAQWWGMVHTQIDTRIHQMYESLSHQIIAIKANMEYQLS | |
| | HYKGPDNDKLLLKDYIYEAEIALNTSANRAMKNIERFMIESSISYLKNNLI | |
| | PSVVENLKKFDADTKKNLDQFIDKNSSVLGSDLHILKSQVDLELNPTTKV | |
| | AFNIQSIPDFDINALIDRLGIQIKSSSVLNMRYKNDKYVDTSGYDSNINING | |
| | DVYKYPTNKNQFGIYNDKLSEVNISQNDYIIYDNKYKNFSISFWVRIPNY | |
| | DNKIVNVNNEYTIINCMRDNNSGWKVSLNHNEIIWTLQDNAGINQKLAF | |
| | NYGNANGISDYINKWIFVTITNDRLGDSKLYINGNLIDQKSILNLGNIHVS | |
| | DNILFKIVNCSYTRYIGIRYFNIFDKELDETEIQTLYSNEPNTNILKDFWGN | |
| | YLLYDKEYYLLNVLKPNNFIDRRKDSTLSINNIRSTILLANRLYSGIKVKIQ | |
| | RVNNSSTNDNLVRKNDQVYINFVASKTHLFPLYADTATTNKEKTIKISSS | |
| | GNRFNQVVVMNSVGNNCTMNFKNNNGNNIGLLGFKADTVVASTWYYT | |
| | HMRDHTNSNGCFWNFISEEHGWQEK | |
| Hn/PMP1-Hc/F | IDVNKEDLYFISDKEGFENIDFSEPEIRYDSNVTTATTSSFTDHFLVNRTFN | 110 |
| | DSDRFPPVELEYAIEPAEIVDNTIMPDIDQKSEISLDNLTTFHYLNAQKMD | |
| | LGFDSSKEQLKMVTSIEESLLDSKKVYTPFTRTAHSVNERISGIAESYLFY | |
| | QWLKTVINDFTDELNQKSNTDKVADISWIIPYVGPALNIGLDLSHGDFTK | |
| | AFEDLGVSILFAIAPEFATISLVALSIYENIEEDSQKEKVINKVENTLARRIE | |
| | KWHQVYAFMVAQWWGMVHTQIDTRIHQMYESLSHQIIAIKANMEYQLS | |
| | HYKGPDNDKLLLKDYIYEAEIALNTSANRAMKNIERFMIESSISYLKNNLI | |
| | PSVVENLKKFDADTKKNLDQFIDKNSSVLGSDLHILKSQVDLELNPTTKV | |
| | AFNIQSIPDFDINALIDRLGIQIKDNSILDMRYENNKFIDISGYGSNISINGD | |
| | VYIYSTNRNQFGIYSSKPSEVNIAQNNDIIYNGRYQNFSISFWVRIPKYFNK | |
| | VNLNNEYTIIDCIRNNNSGWKISLNYNKIIWTLQDTAGNNQKLVFNYTQ | |
| | MISISDYINKWIFVTITNNRLGNSRIYINGNLIDEKSISNLGDIHVSDNILFKI | |
| | VGCNDTRYVGIRYFKVFDTELGKTEIETLYSDEPDPSILKDFWGNYLLYN | |
| | KRYYLLNLLRTDKSITQNSNFLNINQQRGVYQKPNIFSNTRLYTGVEVIIR | |
| | KNGSTDISNTDNFVRKNDLAYINVVDRDVEYRLYADISIAKPEKIIKLIRT | |
| | SNSNNSLGQIIVMDSIGNNCTMNFQNNNGGNIGLLGFHSNNLVASSWYY | |
| | NNIRKNTSSNGCFWSFISKEHGWQEN | |
| Hn/PMP1-Hc/G | IDVNKEDLYFISDKEGFENIDFSEPEIRYDSNVTTATTSSFTDHFLVNRTFN | 111 |
| | DSDRFPPVELEYAIEPAEIVDNTIMPDIDQKSEISLDNLTTFHYLNAQKMD | |
| | LGFDSSKEQLKMVTSIEESLLDSKKVYTPFTRTAHSVNERISGIAESYLFY | |
| | QWLKTVINDFTDELNQKSNTDKVADISWIIPYVGPALNIGLDLSHGDFTK | |
| | AFEDLGVSILFAIAPEFATISLVALSIYENIEEDSQKEKVINKVENTLARRIE | |
| | KWHQVYAFMVAQWWGMVHTQIDTRIHQMYESLSHQIIAIKANMEYQLS | |
| | HYKGPDNDKLLLKDYIYEAEIALNTSANRAMKNIERFMIESSISYLKNNLI | |
| | PSVVENLKKFDADTKKNLDQFIDKNSSVLGSDLHILKSQVDLELNPTTKV | |
| | AFNIQSIPDFDINALIDRLGIQISSNAILSLSYRGGRLIDSSGYGATMNVGSD | |
| | VIFNDIGNGQFKLNNSENSNITAHQSKFVVYDSMFDNFSINFWVRTPKYN | |
| | NNDIQTYLQNEYTIISCIKNDSGWKVSIKGNRIIWTLIDVNAKSKSIFFEYSI | |
| | KDNISDYINKWFSITITNDRLGNANIYINGSLKKSEKILNLDRINSSNDIDF | |
| | KLINCTDTTKFVWIKDFNIFGRELNATEVSSLYWIQSSTNTLKDFWGNPL | |
| | RYDTQYYLFNQGMQNIYIKYFSKASMGETAPRTNFNNAAINYQNLYLGL | |
| | RFIIKKASNSRNINNDNIVREGDYIYLNIDNISDESYRVYVLVNSKEIQTQL | |
| | FLAPINDDPTFYDVLQIKKYYEKTTYNCQILCEKDTKTFGLFGIGKFVKD | |
| | YGYVWDTYDNYFCISQWYLRRISENINKLRLGCNWQFIPVDEGWTE | |
| Hn/PMP1-Hc/H | IDVNKEDLYFISDKEGFENIDFSEPEIRYDSNVTTATTSSFTDHFLVNRTFN | 112 |
| | DSDRFPPVELEYAIEPAEIVDNTIMPDIDQKSEISLDNLTTFHYLNAQKMD | |
| | LGFDSSKEQLKMVTSIEESLLDSKKVYTPFTRTAHSVNERISGIAESYLFY | |
| | QWLKTVINDFTDELNQKSNTDKVADISWIIPYVGPALNIGLDLSHGDFTK | |
| | AFEDLGVSILFAIAPEFATISLVALSIYENIEEDSQKEKVINKVENTLARRIE | |
| | KWHQVYAFMVAQWWGMVHTQIDTRIHQMYESLSHQIIAIKANMEYQLS | |
| | HYKGPDNDKLLLKDYIYEAEIALNTSANRAMKNIERFMIESSISYLKNNLI | |
| | PSVVENLKKFDADTKKNLDQFIDKNSSVLGSDLHILKSQVDLELNPTTKV | |
| | AFNIQSIPDFDINALIDRLGIQLKYNCILNIKYEMDRDKLVDSSGYRSRINI | |
| | GTGVKFSEIDKNQVQLSNLESSKIEVILNNGVIYNSMYENFSTSFWIRIPK | |
| | YFRNINNEYKIISCMQNNSGWEVSLNFSNMNSKIIWTLQDTEGIKKTVVF | |
| | QYTQNINISDYINRWIFVTITNNRLSNSKIYINGRLINEESISDLGNIHASNN | |
| | IMFKLDGCRDPHRYIWIKYFNLFDKELNKKEIKDLYDNQSNSGILKDFWG | |
| | DYLQYDKPYYMLNLYDPNKYLDVNNVGIRGYMYLKGPRGRIVTTNIYL | |
| | NSTLYMGTKFIIKKYASGNKDNIVRNNDRVYINVVVKNKEYRLATNASQ | |
| | AGVEKILSAVEIPDVGNLSQVVVMKSENDQGIRNKCKMNLQDNNGNDI | |
| | GFIGFHQFNNIAKLVASNWYNRQIGKASRTFGCSWEFIPVDDGWGESSL | |
| Anti-BoNT/A | MGTQVQLVESGGGLVQPGGSLRLSCAASGSIFSIYAMGWYRQAPGKQRE | 57 |
| VHH (referred to | LVAAISSYGSTNYADSVKGRFTISRDNAKNTVYLQMNSLKPEDTAVYYC | |
| herein as A8, also | NADIATMTAVGGFDYWGQGTQVTVSSEPKTPKPQ | |
| referred herein as | | |
| B8) | | |
| immunoglobulin | HVQLQQSGGGLVQPGGSLRLSCAASGSIFSIYAMGWYRQAPGKQRELVA | 58 |
| heavy chain | AISSYGSTNYADSVKGRFTISRDNAKNTVYLQMNSLKPEDTAVYYCNAD | |
| variable region, | IATMTAVGGFDYWGQGTQVTVSSEPKTPKPQP | |
| partial [Vicugna | | |
| pacos] | | |
| ACCESSION | | |
| ACS73863 | | |
| TrxA-thrombin | MSDKIIHLTDDSFDTDVLKADGAILVDFWAEWCGPCKMIAPILDEIADEYQG | 59 |
| site-anti-BoNT/A | KLTVAKLNIDQNPGTAPKYGIRGIPTILLFKNGEVAATKVGALSKGQLKEFLD | |
| VHH (A8) | ANLAGGSLVPRGSGGSEFMGTQVQLVESGGGLVQPGGSLRLSCAASGSIF | |
| | SIYAMGWYRQAPGKQRELVAAISSYGSTNYADSVKGRFTISRDNAKNTV | |
| | YLQMNSLKPEDTAVYYCNADIATMTAVGGFDYWGQGTQVTVSSEPKTP | |
| | KPQ | |
| TrxA-thrombin | MSDKIIHLTDDSFDTDVLKADGAILVDFWAEWCGPCKMIAPILDEIADEYQG | 60 |
| site-ACS73863 | KLTVAKLNIDQNPGTAPKYGIRGIPTILLFKNGEVAATKVGALSKGQLKEFLD | |
| | ANLAGGSLVPRGSGGSEFHVQLQQSGGGLVQPGGSLRLSCAASGSIFSIYA | |
| | MGWYRQAPGKQRELVAAISSYGSTNYADSVKGRFTISRDNAKNTVYLQ | |
| | MNSLKPEDTAVYYCNADIATMTAVGGFDYWGQGTQVTVSSEPKTPKPQ | |
| | P | |
| TrxA-thrombin | MSDKIIHLTDDSFDTDVLKADGAILVDFWAEWCGPCKMIAPILDEIADEYQG | 61 |
| site-anti-BoNT/A | KLTVAKLNIDQNPGTAPKYGIRGIPTILLFKNGEVAATKVGALSKGQLKEFLD | |
| VHH (A8)- | ANLAGGSLVPRGSGGSEFMGTQVQLVESGGGLVQPGGSLRLSCAASGSIF | |
| ^{ci}LC/X | SIYAMGWYRQAPGKQRELVAAISSYGSTNYADSVKGRFTISRDNAKNTV | |
| | YLQMNSLKPEDTAVYYCNADIATMTAVGGFDYWGQGTQVTVSSEPKTP | |
| | KPQGGGGSGGGGSKLMKLEINKFNYNDPIDGINVITMRPPRHSDKINKGK | |
| | GPFKAFQVIKNIWIVPERYNFTNNTNDLNIPSEPIMEADAIYNPNYLNTPS | |
| | EKDEFLQGVIKVLERIKSKPEGEKLLELISSSIPLPLVSNGALTLSDNETIAY | |
| | QENNNIVSNLQANLVIYGPGPDIANNATYGLYSTPISNGEGTLSEVSFSPF | |
| | YLKPFDESYGNYRSLVNIVNKFVKREFAPDPASTLMHQLVHVTHNLYGI | |
| | SNRNFYYNFDTGKIETSRQQNSLIFEELLTFGGIDSKAISSLIIKKIIETAKN | |
| | NYTTLISERLNTVTVENDLLKYIKNKIPVQGRLGNFKLDTAEFEKKLNTIL | |
| | FVLNESNLAQRFSILVAKHFLKERPIDPIYVNILDDNSYSTLEGFNISSQGS | |
| | NDFQGQLLESSYFEKIESNALRAFIKI | |
| TrxA-thrombin | MSDKIIHLTDDSFDTDVLKADGAILVDFWAEWCGPCKMIAPILDEIADEYQG | 62 |
| site-ACS73863- | KLTVAKLNIDQNPGTAPKYGIRGIPTILLFKNGEVAATKVGALSKGQLKEFLD | |
| ^{ci}LC/X | ANLAGGSLVPRGSGGSEFHVQLQQSGGGLVQPGGSLRLSCAASGSIFSIYA | |
| | MGWYRQAPGKQRELVAAISSYGSTNYADSVKGRFTISRDNAKNTVYLQ | |
| | MNS LKPEDTAVYYCNADIATMTAVGGFDYWGQGTQVTVSSEPKTPKPQ | |
| | PGGGGSGGGGSKLMKLEINKFNYNDPIDGINVITMRPPRHSDKINKGKGP | |
| | FKAFQVIKNIWIVPERYNFTNNTNDLNIPSEPIMEADAIYNPNYLNTPSEK | |
| | DEFLQGVIKVLERIKSKPEGEKLLELISSSIPLPLVSNGALTLSDNETIAYQE | |
| | NNNIVSNLQANLVIYGPGPDIANNATYGLYSTPISNGEGTLSEVSFSPFYL | |
| | KPFDESYGNYRSLVNIVNKFVKREFAPDPASTLMHQLVHVTHNLYGISN | |
| | RNFYYNFDTGKIETSRQQNSLIFEELLTFGGIDSKAISSLIIKKIIETAKNNY | |
| | TTLISERLNTVTVENDLLKYIKNKIPVQGRLGNFKLDTAEFEKKLNTILFV | |
| | LNESNLAQRFSILVAKHFLKERPIDPIYVNILDDNSYSTLEGFNISSQGSND | |
| | FQGQLLESSYFEKIESNALRAFIKI | |
| TrxA-thrombin | MSDKIIHLTDDSFDTDVLKADGAILVDFWAEWCGPCKMIAPILDEIADEYQG | 63 |
| site-anti-BoNT/A | KLTVAKLNIDQNPGTAPKYGIRGIPTILLFKNGEVAATKVGALSKGQLKEFLD | |
| VHH (A8)- | ANLAGGSLVPRGSGGSEFMGTQVQLVESGGGLVQPGGSLRLSCAASGSIFSIY | |
| ^{ci}LC/En | AMGWYRQAPGKQRELVAAISSYGSTNYADSVKGRFTISRDNAKNTVYLQMNSL | |
| | KPEDTAVYYCNADIATMTAVGGFDYWGQGTQVTVSSEPKTPKPQGGGGSGG | |
| | GGSKLMVTINDLHYSDPIDEDNIINMRIPLYDLEVDDQFINHNVPDLKAF | |
| | QVFPNVWVVPERYTFYSTMKNLDAPANPSRSSYYDPTYLQSDAEKEVFL | |
| | QQMILLFKRINSTQEGQQFLNLLSRSIPVPYESNGDVAMGTTQVIKQMDD | |
| | KGNVLKHRRAHIIIYGPGPDLMAKGSKALTKSRETGRGCMAEIYFSPMY | |
| | HKTYSTKLTNKNSLVDKSVQEFVPDPAVTLIHQLCHGLHALYGIDLGNV | |
| | GSWEFNSNPNSLFSSWFSSKEAVNFEEVMTFGGEDVKVIKSEIDKKIPGIL | |
| | NLIKTTVEPIINKITDPHDEMLQCLQSKYPSLKGTLGQFFFDDTQLEKDIR | |
| | DLWMVMNETMFAENLKALTAARFLVPKVENIVQVDILSPNVYTIDKGF | |
| | NHLSKGFKGQSVSQSYFRKISALARGAVVRA | |
| TrxA-thrombin | MSDKIIHLTDDSFDTDVLKADGAILVDFWAEWCGPCKMIAPILDEIADEYQG | 64 |
| site-ACS73863- | KLTVAKLNIDQNPGTAPKYGIRGIPTILLFKNGEVAATKVGALSKGQLKEFLD | |
| ^{ci}LC/En | ANLAGGSLVPRGSGGSEFHVQLQQSGGGLVQPGGSLRLSCAASGSIFSIYA | |
| | MGWYRQAPGKQRELVAAISSYGSTNYADSVKGRFTISRDNAKNTVYLQ | |
| | MNSLKPEDTAVYYCNADIATMTAVGGFDYWGQGTQVTVSSEPKTPKPQ | |
| | PMVTINDLHYSDPIDEDNIINMRIPLYDLEVDDQFINHNVPDLKAFQVFPN | |
| | VWVVPERYTFYSTMKNLDAPANPSRSSYYDPTYLQSDAEKEVFLQQMIL | |
| | LFKRINSTQEGQQFLNLLSRSIPVPYESNGDVAMGTTQVIKQMDDKGNV | |
| | LKHRRAHIIIYGPGPDLMAKGSKALTKSRETGRGCMAEIYFSPMYHKTYS | |
| | TKLTNKNSLVDKSVQEFVPDPAVTLIHQLCHGLHALYGIDLGNVGSWEF | |
| | NSNPNSLFSSWFSSKEAVNFEEVMTFGGEDVKVIKSEIDKKIPGILNLIKTT | |
| | VEPIINKITDPHDEMLQCLQSKYPSLKGTLGQFFFDDTQLEKDIRDLWMV | |
| | MNETMFAENLKALTAARFLVPKVENIVQVDILSPNVYTIDKGFNHLSKG | |
| | FKGQSVSQSYFRKISALARGAVVRA | |
| TrxA-thrombin | MSDKIIHLTDDSFDTDVLKADGAILVDFWAEWCGPCKMIAPILDEIADEYQG | 65 |
| site-anti-BoNT/A | KLTVAKLNIDQNPGTAPKYGIRGIPTILLFKNGEVAATKVGALSKGQLKEFLD | |
| VHH (A8)- | ANLAGGSLVPRGSGGSEFMGTQVQLVESGGGLVQPGGSLRLSCAASGSIF | |
| ^{ci}LC/X-Hn/X | SIYAMGWYRQAPGKQRELVAAISSYGSTNYADSVKGRFTISRDNAKNTV | |
| Hc/A-His6 | YLQMNSLKPEDTAVYYCNADIATMTAVGGFDYWGQGTQVTVSSEPKTP | |
| | KPQGGGGSGGGGSKLMKLEINKFNYNDPIDGINVITMRPPRHSDKINKGK | |
| | GPFKAFQVIKNIWIVPERYNFTNNTNDLNIPSEPIMEADAIYNPNYLNTPS | |
| | EKDEFLQGVIKVLERIKSKPEGEKLLELISSSIPLPLVSNGALTLSDNETIAY | |
| | QENNNIVSNLQANLVIYGPGPDIANNATYGLYSTPISNGEGTLSEVSFSPF | |
| | YLKPFDESYGNYRSLVNIVNKFVKREFAPDPASTLMHQLVHVTHNLYGI | |
| | SNRNFYYNFDTGKIETSRQQNSLIFEELLTFGGIDSKAISSLIIKKIIETAKN | |
| | NYTTLISERLNTVTVENDLLKYIKNKIPVQGRLGNFKLDTAEFEKKLNTIL | |
| | FVLNESNLAQRFSILVAKHFLKERPIDPIYVNILDDNSYSTLEGFNISSQGS | |
| | NDFQGQLLESSYFEKIESNALRAFIKICHKAIDGRSLGGSLVPRGSGGSAA | |
| | AYNKTLDCIEVENKDLFLISNKDSLNDINLSEEKIKPETTVFFKDKLPPQDI | |
| | TLSNYDFTEANSIPSISQQNILERNEELYEPIRNSLFEIKTIYVDKLTTFHFL | |
| | EAQNIDESIDSSKIRVELTDSVDEALSNPNKVYSPFKNMSNTINSIETGITS | |
| | TYIFYQWLRSIVKDFSDETGKIDVIDKSSDTLAIVPYIGPLLNIGNDIRHGD | |
| | FVGAIELAGITALLEYVPEFTIPILVGLEVIGGELAREQVEAIVNNALDKRD | |
| | QKWAEVYNITKAQWWGTIHLQINTRLAHTYKALSRQANAIKMNMEFQL | |
| | ANYKGNIDDKAKIKNAISETEILLNKSVEQAMKNTEKFMIKLSNSYLTKE | |
| | MIPKVQDNLKNFDLETKKTLDKFIKEKEDILGTNLSSSLRRKVSIRLNKNI | |
| | AFDINDIPFSEFDDLINQYKNEIEDYEVLNLGAEDGKIKDLSGTTSDINIGS | |
| | [chemical structure] | |
| TrxA-thrombin | MSDKIIHLTDDSFDTDVLKADGAILVDFWAEWCGPCKMIAPILDEIADEYQG | 66 |
| site-anti-BoNT/A | KLTVAKLNIDQNPGTAPKYGIRGIPTILLFKNGEVAATKVGALSKGQLKEFLD | |
| VHH (A8)- | ANLAGGSLVPRGSGGSEFMGTQVQLVESGGGLVQPGGSLRLSCAASGSIF | |
| ^{ci}LC/En-Hn/X- | SIYAMGWYRQAPGKQRELVAAISSYGSTNYADSVKGRFTISRDNAKNTV | |
| Hc/A-His6 | YLQMNSLKPEDTAVYYCNADIATMTAVGGFDYWGQGTQVTVSSEPKTP | |
| | KPQGGGGSGGGGSKMVTINDLHYSDPIDEDNIINMRIPLYDLEVDDQFIN | |
| | HNVPDLKAFQVFPNVWVVPERYTFYSTMKNLDAPANPSRSSYYDPTYL | |
| | QSDAEKEVFLQQMILLFKRINSTQEGQQFLNLLSRSIPVPYESNGDVAMG | |
| | TTQVIKQMDDKGNVLKHRRAHIIIYGPGPDLMAKGSKALTKSRETGRGC | |
| | MAEIYFSPMYHKTYSTKLTNKNSLVDKSVQEFVPDPAVTLIHQLCHGLH | |
| | ALYGIDLGNVGSWEFNSNPNSLFSSWFSSKEAVNFEEVMTFGGEDVKVI | |
| | KSEIDKKIPGILNLIKTTVEPIINKITDPHDEMLQCLQSKYPSLKGTLGQFFF | |
| | DDTQLEKDIRDLWMVMNETMFAENLKALTRARYLVPKVENIVQVDILS | |
| | PNVYTIDKGFNHLSKGFKGQSVSQSYFRKISALARGAVVRACHKAIDGR | |
| | SLGGSLVPRGSGGSAAAYNKTLDCIEILEDDLFIMSSKDSFTDTDFSEPSV | |
| | GPVSYKAKKGADTILDSTLSNYDFSKEINFTSTVPIITVEDPLETDEDVPVI | |
| | SEDRTVYVDDYTTFHFLEAQKIGKEVVPTQTKVVFTTNMEEALFDSKKV | |
| | YTVFENTASRINEAGTGIANGMMFYQWLKGIVQDFTEEATQKDTFDKIS | |
| | DVTMIVPYLGNILNIGNDIRKGDFMGAVELGGVTILLEAIPELTLPVLIGLT | |
| | IIEDELEKEQVSQTVYNVLDKRDEKWEEVYGFVKQQWWWMVHTQFET | |
| | RILHAYQALNHQVEAIKANMTYQLANYRGNQEDKELLEKAIDDTLQSLY | |
| | YAVDQAMHNIKRFLIQSSKSYLLNQMLPKTKEQLLAFDQQTLRNVNDFI | |
| | NKNQGVLGESLAKDLKKKVEKRLTSLPVFNLEDLPISEFEDLIHSHEIDIQ | |
| | [chemical structure] | |
| Anti-BoNT/B VHH | QVQLVESGGGLVQPGGSLRLSCAASGFPFHAYYMSWVRQAPGKGLEWV | 67 |
| (J10VHH-BLc- | SHIGNGGIITRYADSVKGRFTISRDNAKNTLYLQMTNLKPEDTALYYCTL | |
| JNE-B10, referred | GTRDDLGPERGQGTQVTVSSEPKTPKPQ | |
| to herein as B10 | | |
| also referred to | | |
| herein as J10) | | |
| Anti-BoNT/B VHH | QLQLVESGGGMVQPGGSLRLSCAASGFTFSTYDMSWVRQAPGKGPEWV | 113 |
| | SIINAGGGSTYYAASVKGRFAISRDNAKNTLYLQMNNLKPEDTALYYCA | |
| | RVASYYCRGYVCSPPEFDYWGQGTQVTVSSEPKTPKPQ | |
| Anti-BoNT/B VHH | QVQLVESGGGLVQSGGSLRLSCAASGSIDSLYHMGWYRQAPGKERELV | 114 |
| (JLJG3) | ARVQDGGSTAYKDSVKGRFTISRDFSRSTMYLQMNSLKPEDTAIYYCAA | |
| | KSTISTPLSWGQGTQVTVSSEPKTPKPQ | |
| TrxA-thrombin | MSDKIIHLTDDSFDTDVLKADGAILVDFWAEWCGPCKMIAPILDEIADEY | 68 |
| site-anti-BoNT/B | QGKLTVAKLNIDQNPGTAPKYGIRGIPTLLLFKNGEVAATKVGALSKGQ | |
| VHH | LKEFLDANLAGGSLVPRGSGGSEFQVQLVESGGGLVQPGGSLRLSCAAS | |
| | GFPFHAYYMSWVRQAPGKGLEWVSHIGNGGIITRYADSVKGRFTISRDN | |
| | AKNTLYLQMTNLKPEDTALYYCTLGTRDDLGPERGQGTQVTVSSEPKTP | |
| | KPQ | |
| TrxA-thrombin | MSDKIIHLTDDSFDTDVLKADGAILVDFWAEWCGPCKMIAPILDEIADEYQG | 69 |
| site-anti-BoNT/B | KLTVAKLNIDQNPGTAPKYGIRGIPTILLFKNGEVAATKVGALSKGQLKEFLD | |
| VHH-^{ci}LC/X | ANLAGGSLVPRGSGGSEFQVQLVESGGGLVQPGGSLRLSCAASGFPFHAY | |
| | YMSWVRQAPGKGLEWVSHIGNGGIITRYADSVKGRFTISRDNAKNTLYL | |
| | QMTNLKPEDTALYYCTLGTRDDLGPERGQGTQVTVSSEPKTPKPQGGGG | |
| | SGGGGSKLMKLEINKFNYNDPIDGINVITMRPPRHSDKINKGKGPFKAFQ | |
| | VIKNIWIVPERYNFTNNTNDLNIPSEPIMEADAIYNPNYLNTPSEKDEFLQ | |
| | GVIKVLERIKSKPEGEKLLELISSSIPLPLVSNGALTLSDNETIAYQENNNIV | |
| | SNLQANLVIYGPGPDIANNATYGLYSTPISNGEGTLSEVSFSPFYLKPFDE | |
| | SYGNYRSLVNIVNKFVKREFAPDPASTLMHQLVHVTHNLYGISNRNFYY | |
| | NFDTGKIETSRQQNSLIFEELLTFGGIDSKAISSLIIKKIIETAKNNYTTLISE | |
| | RLNTVTVENDLLKYIKNKIPVQGRLGNFKLDTAEFEKKLNTILFVLNESN | |
| | LAQRFSILVAKHFLKERPIDPIYVNILDDNSYSTLEGFNISSQGSNDFQGQL | |
| | LESSYFEKIESNALRAFIKI | |
| TrxA-thrombin | MSDKIIHLTDDSFDTDVLKADGAILVDFWAEWCGPCKMIAPILDEIADEYQG | 70 |
| site-anti-BoNT/B | KLTVAKLNIDQNPGTAPKYGIRGIPTILLFKNGEVAATKVGALSKGQLKEFLD | |
| VHH-^{ci}LC/En | ANLAGGSLVPRGSGGSEFQVQLVESGGGLVQPGGSLRLSCAASGFPFHAY | |
| | YMSWVRQAPGKGLEWVSHIGNGGIITRYADSVKGRFTISRDNAKNTLYL | |
| | QMTNLKPEDTALYYCTLGTRDDLGPERGQGTQVTVSSEPKTPKPQGGGG | |
| | SGGGGSKLMVTINDLHYSDPIDEDNIINMRIPLYDLEVDDQFINHNVPDL | |
| | KAFQVFPNVWVVPERYTFYSTMKNLDAPANPSRSSYYDPTYLQSDAEKE | |
| | VFLQQMILLFKRINSTQEGQQFLNLLSRSIPVPYESNGDVAMGTTQVIKQ | |
| | MDDKGNVLKHRRAHIIIYGPGPDLMAKGSKALTKSRETGRGCMAEIYFS | |
| | PMYHKTYSTKLTNKNSLVDKSVQEFVPDPAVTLIHQLCHGLHALYGIDL | |
| | GNVGSWEFNSNPNSLFSSWFSSKEAVNFEEVMTFGGEDVKVIKSEIDKKI | |
| | PGILNLIKTTVEPIINKITDPHDEMLQCLQSKYPSLKGTLGQFFFDDTQLEK | |
| | DIRDLWMVMNETMFAENLKALTAARFLVPKVENIVQVDILSPNVYTIDK | |
| | GFNHLSKGFKGQSVSQSYFRKISALARGAVVRA | |
| TrxA-anti- | MSDKIIHLTDDSFDTDVLKADGAILVDFWAEWCGPCKMIAPILDEIADEYQG | 71 |
| BoNT/B VHH- | KLTVAKLNIDQNPGTAPKYGIRGIPTILLFKNGEVAATKVGALSKGQLKEFLD | |
| ^{ci}LC/X-Hn/X- | ANLAGGSLVPRGSGGSEFQVQLVESGGGLVQPGGSLRLSCAASGFPFHAY | |
| Hc/A-His6 | YMSWVRQAPGKGLEWVSHIGNGGIITRYADSVKGRFTISRDNAKNTLYL | |
| | QMTNLKPEDTALYYCTLGTRDDLGPERGQGTQVTVSSEPKTPKPQGGGG | |
| | SGGGGSKLMKLEINKFNYNDPIDGINVITMRPPRHSDKINKGKGPFKAFQ | |
| | VIKNIWIVPERYNFTNNTNDLNIPSEPIMEADAIYNPNYLNTPSEKDEFLQ | |
| | GVIKVLERIKSKPEGEKLLELISSSIPLPLVSNGALTLSDNETIAYQENNNIV | |
| | SNLQANLVIYGPGPDIANNATYGLYSTPISNGEGTLSEVSFSPFYLKPFDE | |
| | SYGNYRSLVNIVNKFVKREFAPDPASTLMHQLVHVTHNLYGISNRNFYY | |
| | NFDTGKIETSRQQNSLIFEELLTFGGIDSKAISSLIIKKIIETAKNNYTTLISE | |
| | RLNTVTVENDLLKYIKNKIPVQGRLGNFKLDTAEFEKKLNTILFVLNESN | |
| | LAQRFSILVAKHFLKERPIDPIYVNILDDNSYSTLEGFNISSQGSNDFQGQL | |
| | LESSYFEKIESNALRAFIKICHKAIDGRSLGGSLVPRGSGGSAAAYNKTLD | |
| | CIEVENKDLFLISNKDSLNDINLSEEKIKPETTVFFKDKLPPQDITLSNYDF | |
| | TEANSIPSISQQNILERNEELYEPIRNSLFEIKTIYVDKLTTFHFLEAQNIDES | |
| | IDSSKIRVELTDSVDEALSNPNKVYSPFKNMSNTINSIETGITSTYIFYQWL | |
| | RSIVKDFSDETGKIDVIDKSSDTLAIVPYIGPLLNIGNDIRHGDFVGAIELA | |
| | GITALLEYVPEFTIPILVGLEVIGGELAREQVEAIVNNALDKRDQKWAEV | |
| | YNITKAQWWGTIHLQINTRLAHTYKALSRQANAIKMNMEFQLANYKGN | |
| | IDDKAKIKNAISETEILLNKSVEQAMKNTEKFMIKLSNSYLTKEMIPKVQD | |
| | NLKNFDLETKKTLDKFIKEKEDILGTNLSSSLRRKVSIRLNKNIAFDINDIP | |
| | [chemical structure] | |
| TrxA-anti- | MSDKIIHLTDDSFDTDVLKADGAILVDFWAEWCGPCKMIAPILDEIADEYQG | 72 |
| BoNT/B VHH- | KLTVAKLNIDQNPGTAPKYGIRGIPTILLFKNGEVAATKVGALSKGQLKEFLD | |
| ^{ci}LC/En-Hn/En- | ANLAGGSLVPRGSGGSEFQVQLVESGGGLVQPGGSLRLSCAASGFPFHAY | |
| Hc/A-His6 | YMSWVRQAPGKGLEWVSHIGNGGIITRYADSVKGRFTISRDNAKNTLYL | |
| | QMTNLKPEDTALYYCTLGTRDDLGPERGQGTQVTVSSEPKTPKPQGGGG | |
| | SGGGGSASMVTINDLHYSDPIDEDNIINMRIPLYDLEVDDQFINHNVPDLK | |
| | AFQVFPNVWVVPERYTFYSTMKNLDAPANPSRSSYYDPTYLQSDAEKEV | |
| | FLQQMILLFKRINSTQEGQQFLNLLSRSIPVPYESNGDVAMGTTQVIKQM | |
| | DDKGNVLKHRRAHIIIYGPGPDLMAKGSKALTKSRETGRGCMAEIYFSP | |
| | MYHKTYSTKLTNKNSLVDKSVQEFVPDPAVTLIHQLCHGLHALYGIDLG | |
| | NVGSWEFNSNPNSLFSSWFSSKEAVNFEEVMTFGGEDVKVIKSEIDKKIP | |
| | GILNLIKTTVEPIINKITDPHDEMLQCLQSKYPSLKGTLGQFFFDDTQLEK | |
| | DIRDLWMVMNETMFAENLKALTAARFLVPKVENIVQVDILSPNVYTIDK | |
| | GFNHLSKGFKGQSVSQSYFRKISALARGAVVRACHKAIDGRSLGGSLVP | |
| | RGSGGSAAAYNKTLDCIEILEDDLFIMSSKDSFTDTDFSEPSVGPVSYKAK | |
| | KGADTILDSTLSNYDFSKEINFTSTVPIITVEDPLETDEDVPVISEDRTVYV | |
| | DDYTTFHFLEAQKIGKEVVPTQTKVVFTTNMEEALFDSKKVYTVFENTA | |
| | SRINEAGTGIANGMMFYQWLKGIVQDFTEEATQKDTFDKISDVTMIVPY | |
| | LGNILNIGNDIRKGDFMGAVELGGVTILLEAIPELTLPVLIGLTIIEDELEKE | |
| | QVSQTVYNVLDKRDEKWEEVYGFVKQQWWWMVHTQFETRILHAYQA | |
| | LNHQVEAIKANMTYQLANYRGNQEDKELLEKAIDDTLQSLYYAVDQAM | |
| | HNIKRFLIQSSKSYLLNQMLPKTKEQLLAFDQQTLRNVNDFINKNQGVLG | |
| | ESLAKDLKKKVEKRLTSLPVFNLEDLPISEFEDLIHSHEIDIQDSEVLNIGV | |
| | [chemical structure] | |
| | PRGSGSLEHHHHHH | |
| TrxA-anti- | MSDKIIHLTDDSFDTDVLKADGAILVDFWAEWCGPCKMIAPILDEIADEYQG | 73 |
| BoNT/A VHH- | KLTVAKLNIDQNPGTAPKYGIRGIPTILLFKNGEVAATKVGALSKGQLKEFLD | |
| anti-BoNT/B | ANLAGGSLVPRGSGGSEFMGTQVQLVESGGGLVQPGGSLRLSCAASGSIFSIY | |
| VHH-^{ci}LC/X | AMGWYRQAPGKQRELVAAISSYGSTNYADSVKGRFTISRDNAKNTVYLQMNSL | |
| | KPEDTAVYYCNADIATMTAVGGFDYWGQGTQVTVSSEPKTPKPQGGGGSGG | |
| | GGSASQVQLVESGGGLVQPGGSLRLSCAASGFPFHAYYMSWVRQAPGK | |
| | GLEWVSHIGNGGIITRYADSVKGRFTISRDNAKNTLYLQMTNLKPEDTAL | |
| | YYCTLGTRDDLGPERGQGTQVTVSSEPKTPKPQGGGGSGGGGSKLMKL | |
| | EINKFNYNDPIDGINVITMRPPRHSDKINKGKGPFKAFQVIKNIWIVPERY | |
| | NFTNNTNDLNIPSEPIMEADAIYNPNYLNTPSEKDEFLQGVIKVLERIKSK | |
| | PEGEKLLELISSSIPLPLVSNGALTLSDNETIAYQENNNIVSNLQANLVIYG | |
| | PGPDIANNATYGLYSTPISNGEGTLSEVSFSPFYLKPFDESYGNYRSLVNI | |
| | VNKFVKREFAPDPASTLMHQLVHVTHNLYGISNRNFYYNFDTGKIETSR | |
| | QQNSLIFEELLTFGGIDSKAISSLIIKKIIETAKNNYTTLISERLNTVTVENDL | |
| | LKYIKNKIPVQGRLGNFKLDTAEFEKKLNTILFVLNESNLAQRFSILVAKH | |
| | FLKERPIDPIYVNILDDNSYSTLEGFNISSQGSNDFQGQLLESSYFEKIESN | |
| | ALRAFIKI | |
| TrxA-anti- | MSDKIIHLTDDSFDTDVLKADGAILVDFWAEWCGPCKMIAPILDEIADEYQG | 74 |
| BoNT/A VHH | KLTVAKLNIDQNPGTAPKYGIRGIPTILLFKNGEVAATKVGALSKGQLKEFLD | |
| (A8)-anti-BoNT/B | ANLAGGSLVPRGSGGSEFMGTQVQLVESGGGLVQPGGSLRLSCAASGSIF | |
| VHH-^{ci}LC/En | SIYAMGWYRQAPGKQRELVAAISSYGSTNYADSVKGRFTISRDNAKNTV | |
| | YLQMNSLKPEDTAVYYCNADIATMTAVGGFDYWGQGTQVTVSSEPKTP | |
| | KPQGGGGSGGGGSASQVQLVESGGGLVQPGGSLRLSCAASGFPFHAYY | |
| | MSWVRQAPGKGLEWVSHIGNGGIITRYADSVKGRFTISRDNAKNTLYLQ | |
| | MTNLKPEDTALYYCTLGTRDDLGPERGQGTQVTVSSEPKTPKPQGGGGS | |
| | GGGGSKLMVTINDLHYSDPIDEDNIINMRIPLYDLEVDDQFINHNVPDLK | |
| | AFQVFPNVWVVPERYTFYSTMKNLDAPANPSRSSYYDPTYLQSDAEKEV | |
| | FLQQMILLFKRINSTQEGQQFLNLLSRSIPVPYESNGDVAMGTTQVIKQM | |
| | DDKGNVLKHRRAHIIIYGPGPDLMAKGSKALTKSRETGRGCMAEIYFSP | |
| | MYHKTYSTKLTNKNSLVDKSVQEFVPDPAVTLIHQLCHGLHALYGIDLG | |
| | NVGSWEFNSNPNSLFSSWFSSKEAVNFEEVMTFGGEDVKVIKSEIDKKIP | |
| | GILNLIKTTVEPIINKITDPHDEMLQCLQSKYPSLKGTLGQFFFDDTQLEK | |
| | DIRDLWMVMNETMFAENLKALTAARFLVPKVENIVQVDILSPNVYTIDK | |
| | GFNHLSKGFKGQSVSQSYFRKISALARGAVVRA | |
| TrxA-anti- | MSDKIIHLTDDSFDTDVLKADGAILVDFWAEWCGPCKMIAPILDEIADEYQG | 75 |
| BoNT/A VHH | KLTVAKLNIDQNPGTAPKYGIRGIPTILLFKNGEVAATKVGALSKGQLKEFLD | |
| (A8)-anti-BoNT/B | ANLAGGSLVPRGSGGSEFMGTQVQLVESGGGLVQPGGSLRLSCAASGSIFSIY | |
| VHH-^{ci}LC/X- | AMGWYRQAPGKQRELVAAISSYGSTNYADSVKGRFTISRDNAKNTVYLQMNSL | |
| Hn/X-Hc/A-His6 | KPEDTAVYYCNADIATMTAVGGFDYWGQGTQVTVSSEPKTPKPQGGGGSGG | |
| | GGSASQVQLVESGGGLVQPGGSLRLSCAASGFPFHAYYMSWVRQAPGK | |
| | GLEWVSHIGNGGIITRYADSVKGRFTISRDNAKNTLYLQMTNLKPEDTAL | |
| | YYCTLGTRDDLGPERGQGTQVTVSSEPKTPKPQGGGGSGGGGSKLMKL | |
| | EINKFNYNDPIDGINVITMRPPRHSDKINKGKGPFKAFQVIKNIWIVPERY | |
| | NFTNNTNDLNIPSEPIMEADAIYNPNYLNTPSEKDEFLQGVIKVLERIKSK | |
| | PEGEKLLELISSSIPLPLVSNGALTLSDNETIAYQENNNIVSNLQANLVIYG | |
| | PGPDIANNATYGLYSTPISNGEGTLSEVSFSPFYLKPFDESYGNYRSLVNI | |
| | VNKFVKREFAPDPASTLMHQLVHVTHNLYGISNRNFYYNFDTGKIETSR | |
| | QQNSLIFEELLTFGGIDSKAISSLIIKKIIETAKNNYTTLISERLNTVTVENDL | |
| | LKYIKNKIPVQGRLGNFKLDTAEFEKKLNTILFVLNESNLAQRFSILVAKH | |
| | FLKERPIDPIYVNILDDNSYSTLEGFNISSQGSNDFQGQLLESSYFEKIESN | |
| | ALRAFIKICHKAIDGRSLGGSLVPRGSGGSAAAYNKTLDCIEVENKDLFLI | |
| | SNKDSLNDINLSEEKIKPETTVFFKDKLPPQDITLSNYDFTEANSIPSISQQN | |
| | ILERNEELYEPIRNSLFEIKTIYVDKLTTFHFLEAQNIDESIDSSKIRVELTDS | |
| | VDEALSNPNKVYSPFKNMSNTINSIETGITSTYIFYQWLRSIVKDFSDETG | |
| | KIDVIDKSSDTLAIVPYIGPLLNIGNDIRHGDFVGAIELAGITALLEYVPEFT | |
| | IPILVGLEVIGGELAREQVEAIVNNALDKRDQKWAEVYNITKAQWWGTI | |
| | HLQINTRLAHTYKALSRQANAIKMNMEFQLANYKGNIDDKAKIKNAISE | |
| | TEILLNKSVEQAMKNTEKFMIKLSNSYLTKEMIPKVQDNLKNFDLETKKT | |
| | LDKFIKEKEDILGTNLSSSLRRKVSIRLNKNIAFDINDIPFSEFDDLINQYKN | |
| | [chemical structure] | |
| TrxA-anti- | MSDKIIHLTDDSFDTDVLKADGAILVDFWAEWCGPCKMIAPILDEIADEYQG | 76 |
| BoNT/A VHH | KLTVAKLNIDQNPGTAPKYGIRGIPTILLFKNGEVAATKVGALSKGQLKEFLD | |
| (A8)-anti-BoNT/B | ANLAGGSLVPRGSGGSEFMGTQVQLVESGGGLVQPGGSLRLSCAASGSIFSIY | |
| VHH-^{ci}LC/En- | AMGWYRQAPGKQRELVAAISSYGSTNYADSVKGRFTISRDNAKNTVYLQMNSL | |
| Hn/En-Hc/A-His6 | KPEDTAVYYCNADIATMTAVGGFDYWGQGTQVTVSSEPKTPKPQGGGGSGG | |
| | GGSASQVQLVESGGGLVQPGGSLRLSCAASGFPFHAYYMSWVRQAPGK | |
| | GLEWVSHIGNGGIITRYADSVKGRFTISRDNAKNTLYLQMTNLKPEDTAL | |
| | YYCTLGTRDDLGPERGQGTQVTVSSEPKTPKPQGGGGSGGGGSKLMVTI | |
| | NDLHYSDPIDEDNIINMRIPLYDLEVDDQFINHNVPDLKAFQVFPNVWVV | |
| | PERYTFYSTMKNLDAPANPSRSSYYDPTYLQSDAEKEVFLQQMILLFKRI | |
| | NSTQEGQQFLNLLSRSIPVPYESNGDVAMGTTQVIKQMDDKGNVLKHRR | |
| | AHIIIYGPGPDLMAKGSKALTKSRETGRGCMAEIYFSPMYHKTYSTKLTN | |
| | KNSLVDKSVQEFVPDPAVTLIHQLCHGLHALYGIDLGNVGSWEFNSNPN | |
| | SLFSSWFSSKEAVNFEEVMTFGGEDVKVIKSEIDKKIPGILNLIKTTVEPIIN | |
| | KITDPHDEMLQCLQSKYPSLKGTLGQFFFDDTQLEKDIRDLWMVMNET | |
| | MFAENLKALTAARFLVPKVENIVQVDILSPNVYTIDKGFNHLSKGFKGQS | |
| | VSQSYFRKISALARGAVVRACHKAIDGRSLGGSLVPRGSGGSAAAYNKT | |
| | LDCIEILEDDLFIMSSKDSFTDTDFSEPSVGPVSYKAKKGADTILDSTLSNY | |
| | DFSKEINFTSTVPIITVEDPLETDEDVPVISEDRTVYVDDYTTFHFLEAQKI | |
| | GKEVVPTQTKVVFTTNMEEALFDSKKVYTVFENTASRINEAGTGIANGM | |
| | MFYQWLKGIVQDFTEEATQKDTFDKISDVTMIVPYLGNILNIGNDIRKGD | |
| | FMGAVELGGVTILLEAIPELTLPVLIGLTIIEDELEKEQVSQTVYNVLDKR | |
| | DEKWEEVYGFVKQQWWWMVHTQFETRILHAYQALNHQVEAIKANMT | |
| | YQLANYRGNQEDKELLEKAIDDTLQSLYYAVDQAMHNIKRFLIQSSKSY | |
| | LLNQMLPKTKEQLLAFDQQTLRNVNDFINKNQGVLGESLAKDLKKKVE | |
| | KRLTSLPVFNLEDLPISEFEDLIHSHEIDIQDSEVLNIGVNNGKIQDLSGEN | |
| | [chemical structure] | |
| TrxA-thrombin | MSDKIIHLTDDSFDTDVLKADGAILVDFWAEWCGPCKMIAPILDEIADEY | 116 |
| site-anti-BoNT/B | QGKLTVAKLNIDQNPGTAPKYGIRGIPTLLLFKNGEVAATKVGALSKGQ | |
| VHH (B10)-anti- | LKEFLDANLAGGSLVPRGSGGSQLQLVESGGGMVQPGGSLRLSCAASGF | |
| BoNT/A VHH | TFSTYDMSWVRQAPGKGPEWVSIINAGGGSTYYAASVKGRFAISRDNAK | |
| (A8) | NTLYLQMNNLKPEDTALYYCARVASYYCRGYVCSPPEFDYWGQGTQVT | |
| | VSSEPKTPKPQGGGGSGGGGEFMGTQVQLVESGGGLVQPGGSLRLSCAA | |
| | SGSIFSIYAMGWYRQAPGKQRELVAAISSYGSTNYADSVKGRFTISRDNA | |
| | KNTVYLQMNSLKPEDTAVYYCNADIATMTAVGGFDYWGQGTQVTVSS | |
| | EPKTPKPQ | |
| TrxA-thrombin | MSDKIIHLTDDSFDTDVLKADGAILVDFWAEWCGPCKMIAPILDEIADEY | 117 |
| site-anti-BoNT/B | QGKLTVAKLNIDQNPGTAPKYGIRGIPTLLLFKNGEVAATKVGALSKGQ | |
| VHH (JLJG3)- | LKEFLDANLAGGSLVPRGSGGSQVQLVESGGGLVQSGGSLRLSCAASGSI | |
| anti-BoNT/A VHH | DSLYHMGWYRQAPGKERELVARVQDGGSTAYKDSVKGRFTISRDFSRS | |
| (A8) | TMYLQMNSLKPEDTAIYYCAAKSTISTPLSWGQGTQVTVSSEPKTPKPQG | |
| | GGGSGGGGEFMGTQVQLVESGGGLVQPGGSLRLSCAASGSIFSIYAMGW | |
| | YRQAPGKQRELVAAISSYGSTNYADSVKGRFTISRDNAKNTVYLQMNSL | |
| | KPEDTAVYYCNADIATMTAVGGFDYWGQGTQVTVSSEPKTPKPQ | |
| TrxA-thrombin | MSDKIIHLTDDSFDTDVLKADGAILVDFWAEWCGPCKMIAPILDEIADEY | 118 |
| site-anti-BoNT/B | QGKLTVAKLNIDQNPGTAPKYGIRGIPTLLLFKNGEVAATKVGALSKGQ | |
| VHH (J10)-anti- | LKEFLDANLAGGSLVPRGSGGSQVQLVESGGGLVQPGGSLRLSCAASGF | |
| BoNT/A VHH | PFHAYYMSWVRQAPGKGLEWVSHIGNGGIITRYADSVKGRFTISRDNAK | |
| (A8) | NTLYLQMTNLKPEDTALYYCTLGTRDDLGPERGQGTQVTVSSEPKTPKP | |
| | QGGGGSGGGGEFMGTQVQLVESGGGLVQPGGSLRLSCAASGSIFSIYAM | |
| | GWYRQAPGKQRELVAAISSYGSTNYADSVKGRFTISRDNAKNTVYLQM | |
| | NSLKPEDTAVYYCNADIATMTAVGGFDYWGQGTQVTVSSEPKTPKPQ | |
| TrxA-thrombin | MSDKIIHLTDDSFDTDVLKADGAILVDFWAEWCGPCKMIAPILDEIADEY | 119 |
| site-anti-BoNT/B | QGKLTVAKLNIDQNPGTAPKYGIRGIPTLLLFKNGEVAATKVGALSKGQ | |
| VHH (J10)-anti- | LKEFLDANLAGGSLVPRGSGGSQVQLVESGGGLVQPGGSLRLSCAASGF | |
| BoNT/A VHH | PFHAYYMSWVRQAPGKGLEWVSHIGNGGIITRYADSVKGRFTISRDNAK | |
| (A8)-^{ci}BoNT/X-A | NTLYLQMTNLKPEDTALYYCTLGTRDDLGPERGQGTQVTVSSEPKTPKP | |
| | QGGGGSGGGGEFMGTQVQLVESGGGLVQPGGSLRLSCAASGSIFSIYAM | |
| | GWYRQAPGKQRELVAAISSYGSTNYADSVKGRFTISRDNAKNTVYLQM | |
| | NSLKPEDTAVYYCNADIATMTAVGGFDYWGQGTQVTVSSEPKTPKPQG | |
| | GGGSGGGGSKLMKLEINKFNYNDPIDGINVITMRPPRHSDKINKGKGPFK | |
| | AFQVIKNIWIVPERYNFTNNTNDLNIPSEPIMEADAIYNPNYLNTPSEKDE | |
| | FLQGVIKVLERIKSKPEGEKLLELISSSIPLPLVSNGALTLSDNETIAYQEN | |
| | NNIVSNLQANLVIYGPGPDIANNATYGLYSTPISNGEGTLSEVSFSPFYLK | |
| | PFDESYGNYRSLVNIVNKFVKREFAPDPASTLMHQLVHVTHNLYGISNR | |
| | NFYYNFDTGKIETSRQQNSLIFEELLTFGGIDSKAISSLIIKKIIETAKNNYT | |
| | TLISERLNTVTVENDLLKYIKNKIPVQGRLGNFKLDTAEFEKKLNTILFVL | |
| | NESNLAQRFSILVAKHFLKERPIDPIYVNILDDNSYSTLEGFNISSQGSNDF | |
| | QGQLLESSYFEKIESNALRAFIKICHKAIDGRSLGGSLVPRGSGGSAAAYN | |
| | KTLDCIEVENKDLFLISNKDSLNDINLSEEKIKPETTVFFKDKLPPQDITLS | |
| | NYDFTEANSIPSISQQNILERNEELYEPIRNSLFEIKTIYVDKLTTFHFLEAQ | |
| | NIDESIDSSKIRVELTDSVDEALSNPNKVYSPFKNMSNTINSIETGITSTYIF | |
| | YQWLRSIVKDFSDETGKIDVIDKSSDTLAIVPYIGPLLNIGNDIRHGDFVG | |
| | AIELAGITALLEYVPEFTIPILVGLEVIGGELAREQVEAIVNNALDKRDQK | |
| | WAEVYNITKAQWWGTIHLQINTRLAHTYKALSRQANAIKMNMEFQLAN | |
| | YKGNIDDKAKIKNAISETEILLNKSVEQAMKNTEKFMIKLSNSYLTKEMIP | |
| | KVQDNLKNFDLETKKTLDKFIKEKEDILGTNLSSSLRRKVSIRLNKNIAFD | |
| | INDIPFSEFDDLINQYKNEIEDYEVLNLGAEDGKIKDLSGTTSDINIGSDIEII | |
| | NTSILNLRYESNHLIDLSRYASKINIGSKVNFDPIDKNQIQLFNLESSKIEVI | |
| | LKNAIVYNSMYENFSTSFWIRIPKYFNSISLNNEYTIINCMENNSGWKVSL | |
| | NYGEIIWTLQDTQEIKQRVVFKYSQMINISDYINRWIFVTITNNRLNNSKI | |
| | YINGRLIDQKPISNLGNIHASNNIMFKLDGCRDTHRYIWIKYFNLFDKELN | |
| | EKEIKDLYDNQSNSGILKDFWGDYLQYDKPYYMLNLYDPNKYVDVNNV | |
| | GIRGYMYLKGPRGSVMTTNIYLNSSLYRGTKFIIKKYASGNKDNIVRNND | |
| | RVYINVVVKNKEYRLATNASQAGVEKILSALEIPDVGNLSQVVVMKSKN | |
| | DQGITNKCKMNLQDNNGNDIGFIGFHQFNNIAKLVASNWYNRQIERSSR | |
| | TLGCSWEFIPVDDGWGERPLQ | |
| TrxA-thrombin | MSDKIIHLTDDSFDTDVLKADGAILVDFWAEWCGPCKMIAPILDEIADEY | 120 |
| site-anti-BoNT/B | QGKLTVAKLNIDQNPGTAPKYGIRGIPTLLLFKNGEVAATKVGALSKGQ | |
| VHH (J10)-anti- | LKEFLDANLAGGSLVPRGSGGSQVQLVESGGGLVQPGGSLRLSCAASGF | |
| BoNT/A VHH | PFHAYYMSWVRQAPGKGLEWVSHIGNGGIITRYADSVKGRFTISRDNAK | |
| (A8)-^{ci}BoNT/En- | NTLYLQMTNLKPEDTALYYCTLGTRDDLGPERGQGTQVTVSSEPKTPKP | |
| A | QGGGGSGGGGEFMGTQVQLVESGGGLVQPGGSLRLSCAASGSIFSIYAM | |
| | GWYRQAPGKQRELVAAISSYGSTNYADSVKGRFTISRDNAKNTVYLQM | |
| | NSLKPEDTAVYYCNADIATMTAVGGFDYWGQGTQVTVSSEPKTPKPQG | |
| | GGGSGGGGSKLMVTINDLHYSDPIDEDNIINMRIPLYDLEVDDQFINHNV | |
| | PDLKAFQVFPNVWVVPERYTFYSTMKNLDAPANPSRSSYYDPTYLQSDA | |
| | EKEVFLQQMILLFKRINSTQEGQQFLNLLSRSIPVPYESNGDVAMGTTQVI | |
| | KQMDDKGNVLKHRRAHIIIYGPGPDLMAKGSKALTKSRETGRGCMAEIY | |
| | FSPMYHKTYSTKLTNKNSLVDKSVQEFVPDPAVTLIHQLCHGLHALYGI | |
| | DLGNVGSWEFNSNPNSLFSSWFSSKEAVNFEEVMTFGGEDVKVIKSEIDK | |
| | KIPGILNLIKTTVEPIINKITDPHDEMLQCLQSKYPSLKGTLGQFFFDDTQL | |
| | EKDIRDLWMVMNETMFAENLKALTAARFLVPKVENIVQVDILSPNVYTI | |
| | DKGFNHLSKGFKGQSVSQSYFRKISALARGAVVRACHKAIDGRSLGGSL | |
| | VPRGSGGSAAAYNKTLDCIEILEDDLFIMSSKDSFTDTDFSEPSVGPVSYK | |
| | AKKGADTILDSTLSNYDFSKEINFTSTVPIITVEDPLETDEDVPVISEDRTV | |
| | YVDDYTTFHFLEAQKIGKEVVPTQTKVVFTTNMEEALFDSKKVYTVFEN | |
| | TASRINEAGTGIANGMMFYQWLKGIVQDFTEEATQKDTFDKISDVTMIV | |
| | PYLGNILNIGNDIRKGDFMGAVELGGVTILLEAIPELTLPVLIGLTIIEDELE | |
| | KEQVSQTVYNVLDKRDEKWEEVYGFVKQQWWWMVHTQFETRILHAY | |
| | QALNHQVEAIKANMTYQLANYRGNQEDKELLEKAIDDTLQSLYYAVDQ | |
| | AMHNIKRFLIQSSKSYLLNQMLPKTKEQLLAFDQQTLRNVNDFINKNQG | |
| | VLGESLAKDLKKKVEKRLTSLPVFNLEDLPISEFEDLIHSHEIDIQDSEVLN | |
| | IGVNNGKIQDLSGENTPLTLGENLHIINTSILNLRYESNHLIDLSRYASKINI | |
| | GSKVNFDPIDKNQIQLFNLESSKIEVILKNAIVYNSMYENFSTSFWIRIPKY | |
| | FNSISLNNEYTIINCMENNSGWKVSLNYGEIIWTLQDTQEIKQRVVFKYS | |
| | QMINISDYINRWIFVTITNNRLNNSKIYINGRLIDQKPISNLGNIHASNNIMF | |
| | KLDGCRDTHRYIWIKYFNLFDKELNEKEIKDLYDNQSNSGILKDFWGDY | |
| | LQYDKPYYMLNLYDPNKYVDVNNVGIRGYMYLKGPRGSVMTTNIYLNS | |
| | SLYRGTKFIIKKYASGNKDNIVRNNDRVYINVVVKNKEYRLATNASQAG | |
| | VEKILSALEIPDVGNLSQVVVMKSKNDQGITNKCKMNLQDNNGNDIGFI | |
| | GFHQFNNIAKLVASNWYNRQIERSSRTLGCSWEFIPVDDGWGERPLQ | |
| TrxA-thrombin | MSDKIIHLTDDSFDTDVLKADGAILVDFWAEWCGPCKMIAPILDEIADEY | 121 |
| site-anti-BoNT/B | QGKLTVAKLNIDQNPGTAPKYGIRGIPTLLLFKNGEVAATKVGALSKGQ | |
| VHH (J10)-anti- | LKEFLDANLAGGSLVPRGSGGSQVQLVESGGGLVQPGGSLRLSCAASGF | |
| BoNT/A VHH | PFHAYYMSWVRQAPGKGLEWVSHIGNGGIITRYADSVKGRFTISRDNAK | |
| (A8)- | NTLYLQMTNLKPEDTALYYCTLGTRDDLGPERGQGTQVTVSSEPKTPKP | |
| ^{ci}BoNT/PMP1-A | QGGGGSGGGGEFMGTQVQLVESGGGLVQPGGSLRLSCAASGSIFSIYAM | |
| | GWYRQAPGKQRELVAAISSYGSTNYADSVKGRFTISRDNAKNTVYLQM | |
| | NSLKPEDTAVYYCNADIATMTAVGGFDYWGQGTQVTVSSEPKTPKPQG | |
| | GGGSGGGGSKLLQIRVFNYNDPIDGENIVELRYHNRSPVKAFQIVDGIWII | |
| | PERYNFTNDTKKVPDDRALTILEDEVFAVRENDYLTTDVNEKNSFLNNIT | |
| | KLFKRINSSNIGNQLLNYISTSVPYPVVSTNSIKARDYNTIKFDSIDGRRIT | |
| | KSANVLIYGPSMKNLLDKQTRAINGEEAKNGIGCLSDIIFSPNYLSVQTVS | |
| | SSRFVEDPASSLTHQLIHALHNLYGIQYPGEEKFKFGGFIDKLLGTRECID | |
| | YEEVLTYGGKDSEIIRKKIDKSLYPDDFVNKYGEMYKRIKGSNPYYPDEK | |
| | KLKQSFLNRMNPFDQNGTFDTKEFKNHLMDLWFGLNESEFAKEKKILVA | |
| | KHFITKQINPKYTELTNDVYTEDKGFVNGQSIDNQNFKIIDDLISKKVKLC | |
| | HKAIDGRSLGGSLVPRGSGGSAAAYNKTLDCIDVNKEDLYFISDKEGFEN | |
| | IDFSEPEIRYDSNVTTATTSSFTDHFLVNRTFNDSDRFPPVELEYAIEPAEIV | |
| | DNTIMPDIDQKSEISLDNLTTFHYLNAQKMDLGFDSSKEQLKMVTSIEES | |
| | LLDSKKVYTPFTRTAHSVNERISGIAESYLFYQWLKTVINDFTDELNQKS | |
| | NTDKVADISWIIPYVGPALNIGLDLSHGDFTKAFEDLGVSILFAIAPEFATI | |
| | SLVALSIYENIEEDSQKEKVINKVENTLARRIEKWHQVYAFMVAQWWG | |
| | MVHTQIDTRIHQMYESLSHQIIAIKANMEYQLSHYKGPDNDKLLLKDYIY | |
| | EAEIALNTSANRAMKNIERFMIESSISYLKNNLIPSVVENLKKFDADTKKN | |
| | LDQFIDKNSSVLGSDLHILKSQVDLELNPTTKVAFNIQSIPDFDINALIDRL | |
| | GIQIINTSILNLRYESNHLIDLSRYASKINIGSKVNFDPIDKNQIQLFNLESS | |
| | KIEVILKNAIVYNSMYENFSTSFWIRIPKYFNSISLNNEYTIINCMENNSGW | |
| | KVSLNYGEIIWTLQDTQEIKQRVVFKYSQMINISDYINRWIFVTITNNRLN | |
| | NSKIYINGRLIDQKPISNLGNIHASNNIMFKLDGCRDTHRYIWIKYFNLFD | |
| | KELNEKEIKDLYDNQSNSGILKDFWGDYLQYDKPYYMLNLYDPNKYVD | |
| | VNNVGIRGYMYLKGPRGSVMTTNIYLNSSLYRGTKFIIKKYASGNKDNIV | |
| | RNNDRVYINVVVKNKEYRLATNASQAGVEKILSALEIPDVGNLSQVVVM | |
| | KSKNDQGITNKCKMNLQDNNGNDIGFIGFHQFNNIAKLVASNWYNRQIE | |
| | RSSRTLGCSWEFIPVDDGWGERPLQ | |
| Anti-BoNT/A | MGTQVQLVESGGGLVQPGGSLRLSCAASGSIFSIYAMGWYRQAPGKQRE | 124 |
| VHH (A8)- | LVAAISSYGSTNYADSVKGRFTISRDNAKNTVYLQMNSLKPEDTAVYYC | |
| ^{ci}LC/X | NADIATMTAVGGFDYWGQGTQVTVSSEPKTPKPQGGGGSGGGGSKLM | |
| | KLEINKFNYNDPIDGINVITMRPPRHSDKINKGKGPFKAFQVIKNIWIVPE | |
| | RYNFTNNTNDLNIPSEPIMEADAIYNPNYLNTPSEKDEFLQGVIKVLERIK | |
| | SKPEGEKLLELISSSIPLPLVSNGALTLSDNETIAYQENNNIVSNLQANLVI | |
| | YGPGPDIANNATYGLYSTPISNGEGTLSEVSFSPFYLKPFDESYGNYRSLV | |
| | NIVNKFVKREFAPDPASTLMHQLVHVTHNLYGISNRNFYYNFDTGKIETS | |
| | RQQNSLIFEELLTFGGIDSKAISSLIIKKIIETAKNNYTTLISERLNTVTVEN | |
| | DLLKYIKNKIPVQGRLGNFKLDTAEFEKKLNTILFVLNESNLAQRFSILVA | |
| | KHFLKERPIDPIYVNILDDNSYSTLEGFNISSQGSNDFQGQLLESSYFEKIE | |
| | SNALRAFIKI | |
| ACS73863-^{ci}LC/X | HVQLQQSGGGLVQPGGSLRLSCAASGSIFSIYAMGWYRQAPGKQRELVA | 125 |
| | AISSYGSTNYADSVKGRFTISRDNAKNTVYLQMNSLKPEDTAVYYCNAD | |
| | IATMTAVGGFDYWGQGTQVTVSSEPKTPKPQPGGGGSGGGGSKLMKLEI | |
| | NKFNYNDPIDGINVITMRPPRHSDKINKGKGPFKAFQVIKNIWIVPERYNF | |
| | TNNTNDLNIPSEPIMEADAIYNPNYLNTPSEKDEFLQGVIKVLERIKSKPE | |
| | GEKLLELISSSIPLPLVSNGALTLSDNETIAYQENNNIVSNLQANLVIYGPG | |
| | PDIANNATYGLYSTPISNGEGTLSEVSFSPFYLKPFDESYGNYRSLVNIVN | |
| | KFVKREFAPDPASTLMHQLVHVTHNLYGISNRNFYYNFDTGKIETSRQQ | |
| | NSLIFEELLTFGGIDSKAISSLIIKKIIETAKNNYTTLISERLNTVTVENDLLK | |
| | YIKNKIPVQGRLGNFKLDTAEFEKKLNTILFVLNESNLAQRFSILVAKHFL | |
| | KERPIDPIYVNILDDNSYSTLEGFNISSQGSNDFQGQLLESSYFEKIESNAL | |
| | RAFIKI | |
| Anti-BoNT/A | MGTQVQLVESGGGLVQPGGSLRLSCAASGSIFSIYAMGWYRQAPGKQRELVA | 126 |
| VHH (A8)- | AISSYGSTNYADSVKGRFTISRDNAKNTVYLQMNSLKPEDTAVYYCNADIATMT | |
| ^{ci}LC/En | AVGGFDYWGQGTQVTVSSEPKTPKPQGGGGSGGGGSKLMVTINDLHYSD | |
| | PIDEDNIINMRIPLYDLEVDDQFINHNVPDLKAFQVFPNVWVVPERYTFY | |
| | STMKNLDAPANPSRSSYYDPTYLQSDAEKEVFLQQMILLFKRINSTQEGQ | |
| | QFLNLLSRSIPVPYESNGDVAMGTTQVIKQMDDKGNVLKHRRAHIIIYGP | |
| | GPDLMAKGSKALTKSRETGRGCMAEIYFSPMYHKTYSTKLTNKNSLVD | |
| | KSVQEFVPDPAVTLIHQLCHGLHALYGIDLGNVGSWEFNSNPNSLFSSWF | |
| | SSKEAVNFEEVMTFGGEDVKVIKSEIDKKIPGILNLIKTTVEPIINKITDPHD | |
| | EMLQCLQSKYPSLKGTLGQFFFDDTQLEKDIRDLWMVMNETMFAENLK | |
| | ALTAARFLVPKVENIVQVDILSPNVYTIDKGFNHLSKGFKGQSVSQSYFR | |
| | KISALARGAVVRA | |
| ACS73863- | HVQLQQSGGGLVQPGGSLRLSCAASGSIFSIYAMGWYRQAPGKQRELVA | 127 |
| ciLC/En | AISSYGSTNYADSVKGRFTISRDNAKNTVYLQMNSLKPEDTAVYYCNAD | |
| | IATMTAVGGFDYWGQGTQVTVSSEPKTPKPQPMVTINDLHYSDPIDEDNI | |
| | INMRIPLYDLEVDDQFINHNVPDLKAFQVFPNVWVVPERYTFYSTMKNL | |
| | DAPANPSRSSYYDPTYLQSDAEKEVFLQQMILLFKRINSTQEGQQFLNLL | |
| | SRSIPVPYESNGDVAMGTTQVIKQMDDKGNVLKHRRAHIIIYGPGPDLM | |
| | AKGSKALTKSRETGRGCMAEIYFSPMYHKTYSTKLTNKNSLVDKSVQEF | |
| | VPDPAVTLIHQLCHGLHALYGIDLGNVGSWEFNSNPNSLFSSWFSSKEAV | |
| | NFEEVMTFGGEDVKVIKSEIDKKIPGILNLIKTTVEPIINKITDPHDEMLQC | |
| | LQSKYPSLKGTLGQFFFDDTQLEKDIRDLWMVMNETMFAENLKALTAA | |
| | RFLVPKVENIVQVDILSPNVYTIDKGFNHLSKGFKGQSVSQSYFRKISALA | |
| | RGAVVRA | |
| Anti-BoNT/A | MGTQVQLVESGGGLVQPGGSLRLSCAASGSIFSIYAMGWYRQAPGKQRE | 128 |
| VHH (A8)- | LVAAISSYGSTNYADSVKGRFTISRDNAKNTVYLQMNSLKPEDTAVYYC | |
| ciLC/X-Hn/X- | NADIATMTAVGGFDYWGQGTQVTVSSEPKTPKPQGGGGSGGGGSKLM | |
| Hc/A-His6 | KLEINKFNYNDPIDGINVITMRPPRHSDKINKGKGPFKAFQVIKNIWIVPE | |
| | RYNFTNNTNDLNIPSEPIMEADAIYNPNYLNTPSEKDEFLQGVIKVLERIK | |
| | SKPEGEKLLELISSSIPLPLVSNGALTLSDNETIAYQENNNIVSNLQANLVI | |
| | YGPGPDIANNATYGLYSTPISNGEGTLSEVSFSPFYLKPFDESYGNYRSLV | |
| | NIVNKFVKREFAPDPASTLMHQLVHVTHNLYGISNRNFYYNFDTGKIETS | |
| | RQQNSLIFEELLTFGGIDSKAISSLIIKKIIETAKNNYTTLISERLNTVTVEN | |
| | DLLKYIKNKIPVQGRLGNFKLDTAEFEKKLNTILFVLNESNLAQRFSILVA | |
| | KHFLKERPIDPIYVNILDDNSYSTLEGFNISSQGSNDFQGQLLESSYFEKIE | |
| | SNALRAFIKICHKAIDGRSLGGSLVPRGSGGSAAAYNKTLDCIEVENKDL | |
| | FLISNKDSLNDINLSEEKIKPETTVFFKDKLPPQDITLSNYDFTEANSIPSIS | |
| | QQNILERNEELYEPIRNSLFEIKTIYVDKLTTFHFLEAQNIDESIDSSKIRVE | |
| | LTDSVDEALSNPNKVYSPFKNMSNTINSIETGITSTYIFYQWLRSIVKDFSD | |
| | ETGKIDVIDKSSDTLAIVPYIGPLLNIGNDIRHGDFVGAIELAGITALLEYV | |
| | PEFTIPILVGLEVIGGELAREQVEAIVNNALDKRDQKWAEVYNITKAQW | |
| | WGTIHLQINTRLAHTYKALSRQANAIKMNMEFQLANYKGNIDDKAKIKN | |
| | AISETEILLNKSVEQAMKNTEKFMIKLSNSYLTKEMIPKVQDNLKNFDLE | |
| | TKKTLDKFIKEKEDILGTNLSSSLRRKVSIRLNKNIAFDINDIPFSEFDDLIN | |
| | QYKNEIEDYEVLNLGAEDGKIKDLSGTTSDINIGSDIEIINTSILNLRYESN | |
| | HLIDLSRYASKINIGSKVNFDPIDKNQIQLFNLESSKIEVILKNAIVYNSMY | |
| | ENFSTSFWIRIPKYFNSISLNNEYTIINCMENNSGWKVSLNYGEIIWTLQDT | |
| | QEIKQRVVFKYSQMINISDYINRWIFVTITNNRLNNSKIYINGRLIDQKPIS | |
| | NLGNIHASNNIMFKLDGCRDTHRYIWIKYFNLFDKELNEKEIKDLYDNQS | |
| | NSGILKDFWGDYLQYDKPYYMLNLYDPNKYVDVNNVGIRGYMYLKGP | |
| | RGSVMTTNIYLNSSLYRGTKFIIKKYASGNKDNIVRNNDRVYINVVVKN | |
| | KEYRLATNASQAGVEKILSALEIPDVGNLSQVVVMKSKNDQGITNKCKM | |
| | NLQDNNGNDIGFIGFHQFNNIAKLVASNWYNRQIERSSRTLGCSWEFIPV | |
| | DDGWGERPLQGSLVPRGSGSLEHHHHHH | |
| Anti-BoNT/A | MGTQVQLVESGGGLVQPGGSLRLSCAASGSIFSIYAMGWYRQAPGKQRE | 129 |
| VHH (A8)- | LVAAISSYGSTNYADSVKGRFTISRDNAKNTVYLQMNSLKPEDTAVYYC | |
| ciLC/En-Hn/X- | NADIATMTAVGGFDYWGQGTQVTVSSEPKTPKPQGGGGSGGGGSKMV | |
| Hc/A-His6 | TINDLHYSDPIDEDNIINMRIPLYDLEVDDQFINHNVPDLKAFQVFPNVW | |
| | VVPERYTFYSTMKNLDAPANPSRSSYYDPTYLQSDAEKEVFLQQMILLF | |
| | KRINSTQEGQQFLNLLSRSIPVPYESNGDVAMGTTQVIKQMDDKGNVLK | |
| | HRRAHIIIYGPGPDLMAKGSKALTKSRETGRGCMAEIYFSPMYHKTYSTK | |
| | LTNKNSLVDKSVQEFVPDPAVTLIHQLCHGLHALYGIDLGNVGSWEFNS | |
| | NPNSLFSSWFSSKEAVNFEEVMTFGGEDVKVIKSEIDKKIPGILNLIKTTVE | |
| | PIINKITDPHDEMLQCLQSKYPSLKGTLGQFFFDDTQLEKDIRDLWMVMN | |
| | ETMFAENLKALTRARYLVPKVENIVQVDILSPNVYTIDKGFNHLSKGFKG | |
| | QSVSQSYFRKISALARGAVVRACHKAIDGRSLGGSLVPRGSGGSAAAYN | |
| | KTLDCIEILEDDLFIMSSKDSFTDTDFSEPSVGPVSYKAKKGADTILDSTLS | |
| | NYDFSKEINFTSTVPIITVEDPLETDEDVPVISEDRTVYVDDYTTFHFLEAQ | |
| | KIGKEVVPTQTKVVFTTNMEEALFDSKKVYTVFENTASRINEAGTGIANG | |
| | MMFYQWLKGIVQDFTEEATQKDTFDKISDVTMIVPYLGNILNIGNDIRKG | |
| | DFMGAVELGGVTILLEAIPELTLPVLIGLTIIEDELEKEQVSQTVYNVLDK | |
| | RDEKWEEVYGFVKQQWWWMVHTQFETRILHAYQALNHQVEAIKANM | |
| | TYQLANYRGNQEDKELLEKAIDDTLQSLYYAVDQAMHNIKRFLIQSSKS | |
| | YLLNQMLPKTKEQLLAFDQQTLRNVNDFINKNQGVLGESLAKDLKKKV | |
| | EKRLTSLPVFNLEDLPISEFEDLIHSHEIDIQDSEVLNIGVNNGKIQDLSGE | |
| | NTPLTLGENLHIINTSILNLRYESNHLIDLSRYASKINIGSKVNFDPIDKNQI | |
| | QLFNLESSKIEVILKNAIVYNSMYENFSTSFWIRIPKYFNSISLNNEYTIINC | |
| | MENNSGWKVSLNYGEIIWTLQDTQEIKQRVVFKYSQMINISDYINRWIFV | |
| | TITNNRLNNSKIYINGRLIDQKPISNLGNIHASNNIMFKLDGCRDTHRYIWI | |
| | KYFNLFDKELNEKEIKDLYDNQSNSGILKDFWGDYLQYDKPYYMLNLY | |
| | DPNKYVDVNNVGIRGYMYLKGPRGSVMTTNIYLNSSLYRGTKFIIKKYA | |
| | SGNKDNIVRNNDRVYINVVVKNKEYRLATNASQAGVEKILSALEIPDVG | |
| | NLSQVVVMKSKNDQGITNKCKMNLQDNNGNDIGFIGFHQFNNIAKLVAS | |
| | NWYNRQIERSSRTLGCSWEFIPVDDGWGERPLQGSLVPRGSGSLEHHHH | |
| | HH | |
| Anti-BoNT/B VHH | QVQLVESGGGLVQPGGSLRLSCAASGFPFHAYYMSWVRQAPGKGLEWV | 130 |
| | SHIGNGGIITRYADSVKGRFTISRDNAKNTLYLQMTNLKPEDTALYYCTL | |
| | GTRDDLGPERGQGTQVTVSSEPKTPKPQ | |
| Anti-BoNT/B VHH- | QVQLVESGGGLVQPGGSLRLSCAASGFPFHAYYMSWVRQAPGKGLEWV | 131 |
| ciLC/X | SHIGNGGIITRYADSVKGRFTISRDNAKNTLYLQMTNLKPEDTALYYCTL | |
| | GTRDDLGPERGQGTQVTVSSEPKTPKPQGGGGSGGGGSKLMKLEINKFN | |
| | YNDPIDGINVITMRPPRHSDKINKGKGPFKAFQVIKNIWIVPERYNFTNNT | |
| | NDLNIPSEPIMEADAIYNPNYLNTPSEKDEFLQGVIKVLERIKSKPEGEKLL | |
| | ELISSSIPLPLVSNGALTLSDNETIAYQENNNIVSNLQANLVIYGPGPDIAN | |
| | NATYGLYSTPISNGEGTLSEVSFSPFYLKPFDESYGNYRSLVNIVNKFVKR | |
| | EFAPDPASTLMHQLVHVTHNLYGISNRNFYYNFDTGKIETSRQQNSLIFE | |
| | ELLTFGGIDSKAISSLIIKKIIETAKNNYTTLISERLNTVTVENDLLKYIKNK | |
| | IPVQGRLGNFKLDTAEFEKKLNTILFVLNESNLAQRFSILVAKHFLKERPI | |
| | DPIYVNILDDNSYSTLEGFNISSQGSNDFQGQLLESSYFEKIESNALRAFIKI | |
| Anti-BoNT/B VHH- | QVQLVESGGGLVQPGGSLRLSCAASGFPFHAYYMSWVRQAPGKGLEWV | 132 |
| ciLC/En | SHIGNGGIITRYADSVKGRFTISRDNAKNTLYLQMTNLKPEDTALYYCTL | |
| | GTRDDLGPERGQGTQVTVSSEPKTPKPQGGGGSGGGGSKLMVTINDLHY | |
| | SDPIDEDNIINMRIPLYDLEVDDQFINHNVPDLKAFQVFPNVWVVPERYT | |
| | FYSTMKNLDAPANPSRSSYYDPTYLQSDAEKEVFLQQMILLFKRINSTQE | |
| | GQQFLNLLSRSIPVPYESNGDVAMGTTQVIKQMDDKGNVLKHRRAHIIIY | |
| | GPGPDLMAKGSKALTKSRETGRGCMAEIYFSPMYHKTYSTKLTNKNSLV | |
| | DKSVQEFVPDPAVTLIHQLCHGLHALYGIDLGNVGSWEFNSNPNSLFSS | |
| | WFSSKEAVNFEEVMTFGGEDVKVIKSEIDKKIPGILNLIKTTVEPIINKITD | |
| | PHDEMLQCLQSKYPSLKGTLGQFFFDDTQLEKDIRDLWMVMNETMFAE | |
| | NLKALTAARFLVPKVENIVQVDILSPNVYTIDKGFNHLSKGFKGQSVSQS | |
| | YFRKISALARGAVVRA | |
| Anti-BoNT/B | QVQLVESGGGLVQPGGSLRLSCAASGFPFHAYYMSWVRQAPGKGLEWV | 133 |
| VHH-ciLC/X- | SHIGNGGIITRYADSVKGRFTISRDNAKNTLYLQMTNLKPEDTALYYCTL | |
| Hn/X-Hc/A-His 6 | GTRDDLGPERGQGTQVTVSSEPKTPKPQGGGGSGGGGSKLMKLEINKFN | |
| | YNDPIDGINVITMRPPRHSDKINKGKGPFKAFQVIKNIWIVPERYNFTNNT | |
| | NDLNIPSEPIMEADAIYNPNYLNTPSEKDEFLQGVIKVLERIKSKPEGEKLL | |
| | ELISSSIPLPLVSNGALTLSDNETIAYQENNNIVSNLQANLVIYGPGPDIAN | |
| | NATYGLYSTPISNGEGTLSEVSFSPFYLKPFDESYGNYRSLVNIVNKFVKR | |
| | EFAPDPASTLMHQLVHVTHNLYGISNRNFYYNFDTGKIETSRQQNSLIFE | |
| | ELLTFGGIDSKAISSLIIKKIIETAKNNYTTLISERLNTVTVENDLLKYIKNK | |
| | IPVQGRLGNFKLDTAEFEKKLNTILFVLNESNLAQRFSILVAKHFLKERPI | |
| | DPIYVNILDDNSYSTLEGFNISSQGSNDFQGQLLESSYFEKIESNALRAFIKI | |
| | CHKAIDGRSLGGSLVPRGSGGSAAAYNKTLDCIEVENKDLFLISNKDSLN | |
| | DINLSEEKIKPETTVFFKDKLPPQDITLSNYDFTEANSIPSISQQNILERNEE | |
| | LYEPIRNSLFEIKTIYVDKLTTFHFLEAQNIDESIDSSKIRVELTDSVDEALS | |
| | NPNKVYSPFKNMSNTINSIETGITSTYIFYQWLRSIVKDFSDETGKIDVIDK | |
| | SSDTLAIVPYIGPLLNIGNDIRHGDFVGAIELAGITALLEYVPEFTIPILVGL | |
| | EVIGGELAREQVEAIVNNALDKRDQKWAEVYNITKAQWWGTIHLQINT | |
| | RLAHTYKALSRQANAIKMNMEFQLANYKGNIDDKAKIKNAISETEILLN | |
| | KSVEQAMKNTEKFMIKLSNSYLTKEMIPKVQDNLKNFDLETKKTLDKFI | |
| | KEKEDILGTNLSSSLRRKVSIRLNKNIAFDINDIPFSEFDDLINQYKNEIEDY | |
| | EVLNLGAEDGKIKDLSGTTSDINIGSDIEIINTSILNLRYESNHLIDLSRYAS | |
| | KINIGSKVNFDPIDKNQIQLFNLESSKIEVILKNAIVYNSMYENFSTSFWIRI | |
| | PKYFNSISLNNEYTIINCMENNSGWKVSLNYGEIIWTLQDTQEIKQRVVF | |
| | KYSQMINISDYINRWIFVTITNNRLNNSKIYINGRLIDQKPISNLGNIHASN | |
| | NIMFKLDGCRDTHRYIWIKYFNLFDKELNEKEIKDLYDNQSNSGILKDFW | |
| | GDYLQYDKPYYMLNLYDPNKYVDVNNVGIRGYMYLKGPRGSVMTTNI | |
| | YLNSSLYRGTKFIIKKYASGNKDNIVRNNDRVYINVVVKNKEYRLATNA | |
| | SQAGVEKILSALEIPDVGNLSQVVVMKSKNDQGITNKCKMNLQDNNGN | |
| | DIGFIGFHQFNNIAKLVASNWYNRQIERSSRTLGCSWEFIPVDDGWGERP | |
| | LQGSLVPRGSGSLEHHHHHH | |
| Anti-BoNT/B | QVQLVESGGGLVQPGGSLRLSCAASGFPFHAYYMSWVRQAPGKGLEWV | 134 |
| VHH-ciLC/En- | SHIGNGGIITRYADSVKGRFTISRDNAKNTLYLQMTNLKPEDTALYYCTL | |
| Hn/En-Hc/A-His6 | GTRDDLGPERGQGTQVTVSSEPKTPKPQGGGGSGGGGSASMVTINDLHY | |
| | SDPIDEDNIINMRIPLYDLEVDDQFINHNVPDLKAFQVFPNVWVVPERYT | |
| | FYSTMKNLDAPANPSRSSYYDPTYLQSDAEKEVFLQQMILLFKRINSTQE | |
| | GQQFLNLLSRSIPVPYESNGDVAMGTTQVIKQMDDKGNVLKHRRAHIIIY | |
| | GPGPDLMAKGSKALTKSRETGRGCMAEIYFSPMYHKTYSTKLTNKNSLV | |
| | DKSVQEFVPDPAVTLIHQLCHGLHALYGIDLGNVGSWEFNSNPNSLFSS | |
| | WFSSKEAVNFEEVMTFGGEDVKVIKSEIDKKIPGILNLIKTTVEPIINKITD | |
| | PHDEMLQCLQSKYPSLKGTLGQFFFDDTQLEKDIRDLWMVMNETMFAE | |
| | NLKALTAARFLVPKVENIVQVDILSPNVYTIDKGFNHLSKGFKGQSVSQS | |
| | YFRKISALARGAVVRACHKAIDGRSLGGSLVPRGSGGSAAAYNKTLDCI | |
| | EILEDDLFIMSSKDSFTDTDFSEPSVGPVSYKAKKGADTILDSTLSNYDFS | |
| | KEINFTSTVPIITVEDPLETDEDVPVISEDRTVYVDDYTTFHFLEAQKIGKE | |
| | VVPTQTKVVFTTNMEEALFDSKKVYTVFENTASRINEAGTGIANGMMFY | |
| | QWLKGIVQDFTEEATQKDTFDKISDVTMIVPYLGNILNIGNDIRKGDFMG | |
| | AVELGGVTILLEAIPELTLPVLIGLTIIEDELEKEQVSQTVYNVLDKRDEK | |
| | WEEVYGFVKQQWWWMVHTQFETRILHAYQALNHQVEAIKANMTYQL | |
| | ANYRGNQEDKELLEKAIDDTLQSLYYAVDQAMHNIKRFLIQSSKSYLLN | |
| | QMLPKTKEQLLAFDQQTLRNVNDFINKNQGVLGESLAKDLKKKVEKRL | |
| | TSLPVFNLEDLPISEFEDLIHSHEIDIQDSEVLNIGVNNGKIQDLSGENTPLT | |
| | LGENLHIINTSILNLRYESNHLIDLSRYASKINIGSKVNFDPIDKNQIQLFNL | |
| | ESSKIEVILKNAIVYNSMYENFSTSFWIRIPKYFNSISLNNEYTIINCMENNS | |
| | GWKVSLNYGEIIWTLQDTQEIKQRVVFKYSQMINISDYINRWIFVTITNNR | |
| | LNNSKIYINGRLIDQKPISNLGNIHASNNIMFKLDGCRDTHRYIWIKYFNL | |
| | FDKELNEKEIKDLYDNQSNSGILKDFWGDYLQYDKPYYMLNLYDPNKY | |
| | VDVNNVGIRGYMYLKGPRGSVMTTNIYLNSSLYRGTKFIIKKYASGNKD | |
| | NIVRNNDRVYINVVVKNKEYRLATNASQAGVEKILSALEIPDVGNLSQV | |
| | VVMKSKNDQGITNKCKMNLQDNNGNDIGFIGFHQFNNIAKLVASNWYN | |
| | RQIERSSRTLGCSWEFIPVDDGWGERPLQGSLVPRGSGSLEHHHHHH | |
| Anti-BoNT/A | MGTQVQLVESGGGLVQPGGSLRLSCAASGSIFSIYAMGWYRQAPGKQRE | 135 |
| VHH-anti-BoNT/B | LVAAISSYGSTNYADSVKGRFTISRDNAKNTVYLQMNSLKPEDTAVYYC | |
| VHH-ciLC/X | NADIATMTAVGGFDYWGQGTQVTVSSEPKTPKPQGGGGSGGGGSASQV | |
| | QLVESGGGLVQPGGSLRLSCAASGFPFHAYYMSWVRQAPGKGLEWVSH | |
| | IGNGGIITRYADSVKGRFTISRDNAKNTLYLQMTNLKPEDTALYYCTLGT | |
| | RDDLGPERGQGTQVTVSSEPKTPKPQGGGGSGGGGSKLMKLEINKFNYN | |
| | DPIDGINVITMRPPRHSDKINKGKGPFKAFQVIKNIWIVPERYNFTNNTND | |
| | LNIPSEPIMEADAIYNPNYLNTPSEKDEFLQGVIKVLERIKSKPEGEKLLEL | |
| | ISSSIPLPLVSNGALTLSDNETIAYQENNNIVSNLQANLVIYGPGPDIANNA | |
| | TYGLYSTPISNGEGTLSEVSFSPFYLKPFDESYGNYRSLVNIVNKFVKREF | |
| | APDPASTLMHQLVHVTHNLYGISNRNFYYNFDTGKIETSRQQNSLIFEEL | |
| | LTFGGIDSKAISSLIIKKIIETAKNNYTTLISERLNTVTVENDLLKYIKNKIP | |
| | VQGRLGNFKLDTAEFEKKLNTILFVLNESNLAQRFSILVAKHFLKERPIDP | |
| | IYVNILDDNSYSTLEGFNISSQGSNDFQGQLLESSYFEKIESNALRAFIKI | |
| Anti-BoNT/A | MGTQVQLVESGGGLVQPGGSLRLSCAASGSIFSIYAMGWYRQAPGKQRE | 136 |
| VHH (A8)-anti- | LVAAISSYGSTNYADSVKGRFTISRDNAKNTVYLQMNSLKPEDTAVYYC | |
| BoNT/B VHH- | NADIATMTAVGGFDYWGQGTQVTVSSEPKTPKPQGGGGSGGGGSASQV | |
| ciLC/En | QLVESGGGLVQPGGSLRLSCAASGFPFHAYYMSWVRQAPGKGLEWVSH | |
| | IGNGGIITRYADSVKGRFTISRDNAKNTLYLQMTNLKPEDTALYYCTLGT | |
| | RDDLGPERGQGTQVTVSSEPKTPKPQGGGGSGGGGSKLMVTINDLHYSD | |
| | PIDEDNIINMRIPLYDLEVDDQFINHNVPDLKAFQVFPNVWVVPERYTFY | |
| | STMKNLDAPANPSRSSYYDPTYLQSDAEKEVFLQQMILLFKRINSTQEGQ | |
| | QFLNLLSRSIPVPYESNGDVAMGTTQVIKQMDDKGNVLKHRRAHIIIYGP | |
| | GPDLMAKGSKALTKSRETGRGCMAEIYFSPMYHKTYSTKLTNKNSLVD | |
| | KSVQEFVPDPAVTLIHQLCHGLHALYGIDLGNVGSWEFNSNPNSLFSSWF | |
| | SSKEAVNFEEVMTFGGEDVKVIKSEIDKKIPGILNLIKTTVEPIINKITDPHD | |
| | EMLQCLQSKYPSLKGTLGQFFFDDTQLEKDIRDLWMVMNETMFAENLK | |
| | ALTAARFLVPKVENIVQVDILSPNVYTIDKGFNHLSKGFKGQSVSQSYFR | |
| | KISALARGAVVRA | |
| TrxA-anti- | MGTQVQLVESGGGLVQPGGSLRLSCAASGSIFSIYAMGWYRQAPGKQRE | 137 |
| BoNT/A VHH | LVAAISSYGSTNYADSVKGRFTISRDNAKNTVYLQMNSLKPEDTAVYYC | |
| (A8)-anti-BoNT/B | NADIATMTAVGGFDYWGQGTQVTVSSEPKTPKPQGGGGSGGGGSASQV | |
| VHH-ciLC/X- | QLVESGGGLVQPGGSLRLSCAASGFPFHAYYMSWVRQAPGKGLEWVSH | |
| Hn/X-Hc/A-His6 | IGNGGIITRYADSVKGRFTISRDNAKNTLYLQMTNLKPEDTALYYCTLGT | |
| | RDDLGPERGQGTQVTVSSEPKTPKPQGGGGSGGGGSKLMKLEINKFNYN | |
| | DPIDGINVITMRPPRHSDKINKGKGPFKAFQVIKNIWIVPERYNFTNNTND | |
| | LNIPSEPIMEADAIYNPNYLNTPSEKDEFLQGVIKVLERIKSKPEGEKLLEL | |
| | ISSSIPLPLVSNGALTLSDNETIAYQENNNIVSNLQANLVIYGPGPDIANNA | |
| | TYGLYSTPISNGEGTLSEVSFSPFYLKPFDESYGNYRSLVNIVNKFVKREF | |
| | APDPASTLMHQLVHVTHNLYGISNRNFYYNFDTGKIETSRQQNSLIFEEL | |
| | LTFGGIDSKAISSLIIKKIIETAKNNYTTLISERLNTVTVENDLLKYIKNKIP | |
| | VQGRLGNFKLDTAEFEKKLNTILFVLNESNLAQRFSILVAKHFLKERPIDP | |
| | IYVNILDDNSYSTLEGFNISSQGSNDFQGQLLESSYFEKIESNALRAFIKIC | |
| | HKAIDGRSLGGSLVPRGSGGSAAAYNKTLDCIEVENKDLFLISNKDSLND | |
| | INLSEEKIKPETTVFFKDKLPPQDITLSNYDFTEANSIPSISQQNILERNEEL | |
| | YEPIRNSLFEIKTIYVDKLTTFHFLEAQNIDESIDSSKIRVELTDSVDEALSN | |
| | PNKVYSPFKNMSNTINSIETGITSTYIFYQWLRSIVKDFSDETGKIDVIDKS | |
| | SDTLAIVPYIGPLLNIGNDIRHGDFVGAIELAGITALLEYVPEFTIPILVGLE | |
| | VIGGELAREQVEAIVNNALDKRDQKWAEVYNITKAQWWGTIHLQINTR | |
| | LAHTYKALSRQANAIKMNMEFQLANYKGNIDDKAKIKNAISETEILLNKS | |
| | VEQAMKNTEKFMIKLSNSYLTKEMIPKVQDNLKNFDLETKKTLDKFIKE | |
| | KEDILGTNLSSSLRRKVSIRLNKNIAFDINDIPFSEFDDLINQYKNEIEDYEV | |
| | LNLGAEDGKIKDLSGTTSDINIGSDIEIINTSILNLRYESNHLIDLSRYASKI | |
| | NIGSKVNFDPIDKNQIQLFNLESSKIEVILKNAIVYNSMYENFSTSFWIRIP | |
| | KYFNSISLNNEYTIINCMENNSGWKVSLNYGEIIWTLQDTQEIKQRVVFK | |
| | YSQMINISDYINRWIFVTITNNRLNNSKIYINGRLIDQKPISNLGNIHASNNI | |
| | MFKLDGCRDTHRYIWIKYFNLFDKELNEKEIKDLYDNQSNSGILKDFWG | |
| | DYLQYDKPYYMLNLYDPNKYVDVNNVGIRGYMYLKGPRGSVMTTNIY | |
| | LNSSLYRGTKFIIKKYASGNKDNIVRNNDRVYINVVVKNKEYRLATNAS | |
| | QAGVEKILSALEIPDVGNLSQVVVMKSKNDQGITNKCKMNLQDNNGNDI | |
| | GFIGFHQFNNIAKLVASNWYNRQIERSSRTLGCSWEFIPVDDGWGERPLQ | |
| | GSLVPRGSGSLEHHHHHH | |
| Anti-BoNT/A | MGTQVQLVESGGGLVQPGGSLRLSCAASGSIFSIYAMGWYRQAPGKQRE | 138 |
| VHH (A8)-anti- | LVAAISSYGSTNYADSVKGRFTISRDNAKNTVYLQMNSLKPEDTAVYYC | |
| BoNT/B VHH- | NADIATMTAVGGFDYWGQGTQVTVSSEPKTPKPQGGGGSGGGGSASQV | |
| ciLC/En-Hn/En- | QLVESGGGLVQPGGSLRLSCAASGFPFHAYYMSWVRQAPGKGLEWVSH | |
| Hc/A-His6 | IGNGGIITRYADSVKGRFTISRDNAKNTLYLQMTNLKPEDTALYYCTLGT | |
| | RDDLGPERGQGTQVTVSSEPKTPKPQGGGGSGGGGSKLMVTINDLHYSD | |
| | PIDEDNIINMRIPLYDLEVDDQFINHNVPDLKAFQVFPNVWVVPERYTFY | |
| | STMKNLDAPANPSRSSYYDPTYLQSDAEKEVFLQQMILLFKRINSTQEGQ | |
| | QFLNLLSRSIPVPYESNGDVAMGTTQVIKQMDDKGNVLKHRRAHIIIYGP | |
| | GPDLMAKGSKALTKSRETGRGCMAEIYFSPMYHKTYSTKLTNKNSLVD | |
| | KSVQEFVPDPAVTLIHQLCHGLHALYGIDLGNVGSWEFNSNPNSLFSSWF | |
| | SSKEAVNFEEVMTFGGEDVKVIKSEIDKKIPGILNLIKTTVEPIINKITDPHD | |
| | EMLQCLQSKYPSLKGTLGQFFFDDTQLEKDIRDLWMVMNETMFAENLK | |
| | ALTAARFLVPKVENIVQVDILSPNVYTIDKGFNHLSKGFKGQSVSQSYFR | |
| | KISALARGAVVRACHKAIDGRSLGGSLVPRGSGGSAAAYNKTLDCIEILE | |
| | DDLFIMSSKDSFTDTDFSEPSVGPVSYKAKKGADTILDSTLSNYDFSKEIN | |
| | FTSTVPIITVEDPLETDEDVPVISEDRTVYVDDYTTFHFLEAQKIGKEVVPT | |
| | QTKVVFTTNMEEALFDSKKVYTVFENTASRINEAGTGIANGMMFYQWL | |
| | KGIVQDFTEEATQKDTFDKISDVTMIVPYLGNILNIGNDIRKGDFMGAVE | |
| | LGGVTILLEAIPELTLPVLIGLTIIEDELEKEQVSQTVYNVLDKRDEKWEE | |
| | VYGFVKQQWWWMVHTQFETRILHAYQALNHQVEAIKANMTYQLANY | |
| | RGNQEDKELLEKAIDDTLQSLYYAVDQAMHNIKRFLIQSSKSYLLNQML | |
| | PKTKEQLLAFDQQTLRNVNDFINKNQGVLGESLAKDLKKKVEKRLTSLP | |
| | VFNLEDLPISEFEDLIHSHEIDIQDSEVLNIGVNNGKIQDLSGENTPLTLGE | |
| | NLHIINTSILNLRYESNHLIDLSRYASKINIGSKVNFDPIDKNQIQLFNLESS | |
| | KIEVILKNAIVYNSMYENFSTSFWIRIPKYFNSISLNNEYTIINCMENNSGW | |
| | KVSLNYGEIIWTLQDTQEIKQRVVFKYSQMINISDYINRWIFVTITNNRLN | |
| | NSKIYINGRLIDQKPISNLGNIHASNNIMFKLDGCRDTHRYIWIKYFNLFD | |
| | KELNEKEIKDLYDNQSNSGILKDFWGDYLQYDKPYYMLNLYDPNKYVD | |
| | VNNVGIRGYMYLKGPRGSVMTTNIYLNSSLYRGTKFIIKKYASGNKDNIV | |
| | RNNDRVYINVVVKNKEYRLATNASQAGVEKILSALEIPDVGNLSQVVVM | |
| | KSKNDQGITNKCKMNLQDNNGNDIGFIGFHQFNNIAKLVASNWYNRQIE | |
| | RSSRTLGCSWEFIPVDDGWGERPLQGSLVPRGSGSLEHHHHHH | |
| Anti-BoNT/B VHH | QLQLVESGGGMVQPGGSLRLSCAASGFTFSTYDMSWVRQAPGKGPEWV | 139 |
| (B10)-anti- | SIINAGGGSTYYAASVKGRFAISRDNAKNTLYLQMNNLKPEDTALYYCA | |
| BoNT/A VHH | RVASYYCRGYVCSPPEFDYWGQGTQVTVSSEPKTPKPQGGGGSGGGGE | |
| (A8) | FMGTQVQLVESGGGLVQPGGSLRLSCAASGSIFSIYAMGWYRQAPGKQR | |
| | ELVAAISSYGSTNYADSVKGRFTISRDNAKNTVYLQMNSLKPEDTAVYY | |
| | CNADIATMTAVGGFDYWGQGTQVTVSSEPKTPKPQ | |
| Anti-BoNT/B VHH | QVQLVESGGGLVQSGGSLRLSCAASGSIDSLYHMGWYRQAPGKERELV | 140 |
| (JLJG3)-anti- | ARVQDGGSTAYKDSVKGRFTISRDFSRSTMYLQMNSLKPEDTAIYYCAA | |
| BoNT/A VHH | KSTISTPLSWGQGTQVTVSSEPKTPKPQGGGGSGGGGEFMGTQVQLVES | |
| (A8) | GGGLVQPGGSLRLSCAASGSIFSIYAMGWYRQAPGKQRELVAAISSYGST | |
| | NYADSVKGRFTISRDNAKNTVYLQMNSLKPEDTAVYYCNADIATMTAV | |
| | GGFDYWGQGTQVTVSSEPKTPKPQ | |
| Anti-BoNT/B VHH | QVQLVESGGGLVQPGGSLRLSCAASGFPFHAYYMSWVRQAPGKGLEWV | 141 |
| (J10)-anti-BoNT/A | SHIGNGGIITRYADSVKGRFTISRDNAKNTLYLQMTNLKPEDTALYYCTL | |
| VHH (A8) | GTRDDLGPERGQGTQVTVSSEPKTPKPQGGGGSGGGGEFMGTQVQLVE | |
| | SGGGLVQPGGSLRLSCAASGSIFSIYAMGWYRQAPGKQRELVAAISSYGS | |
| | TNYADSVKGRFTISRDNAKNTVYLQMNSLKPEDTAVYYCNADIATMTA | |
| | VGGFDYWGQGTQVTVSSEPKTPKPQ | |
| Anti-BoNT/B VHH | QVQLVESGGGLVQPGGSLRLSCAASGFPFHAYYMSWVRQAPGKGLEWV | 142 |
| (J10)-anti-BoNT/A | SHIGNGGIITRYADSVKGRFTISRDNAKNTLYLQMTNLKPEDTALYYCTL | |
| VHH (A8)- | GTRDDLGPERGQGTQVTVSSEPKTPKPQGGGGSGGGGEFMGTQVQLVE | |
| ciBoNT/X-A | SGGGLVQPGGSLRLSCAASGSIFSIYAMGWYRQAPGKQRELVAAISSYGS | |
| | TNYADSVKGRFTISRDNAKNTVYLQMNSLKPEDTAVYYCNADIATMTA | |
| | VGGFDYWGQGTQVTVSSEPKTPKPQGGGGSGGGGSKLMKLEINKFNYN | |
| | DPIDGINVITMRPPRHSDKINKGKGPFKAFQVIKNIWIVPERYNFTNNTND | |
| | LNIPSEPIMEADAIYNPNYLNTPSEKDEFLQGVIKVLERIKSKPEGEKLLEL | |
| | ISSSIPLPLVSNGALTLSDNETIAYQENNNIVSNLQANLVIYGPGPDIANNA | |
| | TYGLYSTPISNGEGTLSEVSFSPFYLKPFDESYGNYRSLVNIVNKFVKREF | |
| | APDPASTLMHQLVHVTHNLYGISNRNFYYNFDTGKIETSRQQNSLIFEEL | |
| | LTFGGIDSKAISSLIIKKIIETAKNNYTTLISERLNTVTVENDLLKYIKNKIP | |
| | VQGRLGNFKLDTAEFEKKLNTILFVLNESNLAQRFSILVAKHFLKERPIDP | |
| | IYVNILDDNSYSTLEGFNISSQGSNDFQGQLLESSYFEKIESNALRAFIKIC | |
| | HKAIDGRSLGGSLVPRGSGGSAAAYNKTLDCIEVENKDLFLISNKDSLND | |
| | INLSEEKIKPETTVFFKDKLPPQDITLSNYDFTEANSIPSISQQNILERNEEL | |
| | YEPIRNSLFEIKTIYVDKLTTFHFLEAQNIDESIDSSKIRVELTDSVDEALSN | |
| | PNKVYSPFKNMSNTINSIETGITSTYIFYQWLRSIVKDFSDETGKIDVIDKS | |
| | SDTLAIVPYIGPLLNIGNDIRHGDFVGAIELAGITALLEYVPEFTIPILVGLE | |
| | VIGGELAREQVEAIVNNALDKRDQKWAEVYNITKAQWWGTIHLQINTR | |
| | LAHTYKALSRQANAIKMNMEFQLANYKGNIDDKAKIKNAISETEILLNKS | |
| | VEQAMKNTEKFMIKLSNSYLTKEMIPKVQDNLKNFDLETKKTLDKFIKE | |
| | KEDILGTNLSSSLRRKVSIRLNKNIAFDINDIPFSEFDDLINQYKNEIEDYEV | |
| | LNLGAEDGKIKDLSGTTSDINIGSDIEIINTSILNLRYESNHLIDLSRYASKI | |
| | NIGSKVNFDPIDKNQIQLFNLESSKIEVILKNAIVYNSMYENFSTSFWIRIP | |
| | KYFNSISLNNEYTIINCMENNSGWKVSLNYGEIIWTLQDTQEIKQRVVFK | |
| | YSQMINISDYINRWIFVTITNNRLNNSKIYINGRLIDQKPISNLGNIHASNNI | |
| | MFKLDGCRDTHRYIWIKYFNLFDKELNEKEIKDLYDNQSNSGILKDFWG | |
| | DYLQYDKPYYMLNLYDPNKYVDVNNVGIRGYMYLKGPRGSVMTTNIY | |
| | LNSSLYRGTKFIIKKYASGNKDNIVRNNDRVYINVVVKNKEYRLATNAS | |
| | QAGVEKILSALEIPDVGNLSQVVVMKSKNDQGITNKCKMNLQDNNGNDI | |
| | GFIGFHQFNNIAKLVASNWYNRQIERSSRTLGCSWEFIPVDDGWGERPLQ | |
| Anti-BoNT/B VHH | QVQLVESGGGLVQPGGSLRLSCAASGFPFHAYYMSWVRQAPGKGLEWV | 143 |
| J(10)-anti-BoNT/A | SHIGNGGIITRYADSVKGRFTISRDNAKNTLYLQMTNLKPEDTALYYCTL | |
| VHH (A8)- | GTRDDLGPERGQGTQVTVSSEPKTPKPQGGGGSGGGGEFMGTQVQLVE | |
| ciBoNT/En-A | SGGGLVQPGGSLRLSCAASGSIFSIYAMGWYRQAPGKQRELVAAISSYGS | |
| | TNYADSVKGRFTISRDNAKNTVYLQMNSLKPEDTAVYYCNADIATMTA | |
| | VGGFDYWGQGTQVTVSSEPKTPKPQGGGGSGGGGSKLMVTINDLHYSD | |
| | PIDEDNIINMRIPLYDLEVDDQFINHNVPDLKAFQVFPNVWVVPERYTFY | |
| | STMKNLDAPANPSRSSYYDPTYLQSDAEKEVFLQQMILLFKRINSTQEGQ | |
| | QFLNLLSRSIPVPYESNGDVAMGTTQVIKQMDDKGNVLKHRRAHIIIYGP | |
| | GPDLMAKGSKALTKSRETGRGCMAEIYFSPMYHKTYSTKLTNKNSLVD | |
| | KSVQEFVPDPAVTLIHQLCHGLHALYGIDLGNVGSWEFNSNPNSLFSSWF | |
| | SSKEAVNFEEVMTFGGEDVKVIKSEIDKKIPGILNLIKTTVEPIINKITDPHD | |
| | EMLQCLQSKYPSLKGTLGQFFFDDTQLEKDIRDLWMVMNETMFAENLK | |
| | ALTAARFLVPKVENIVQVDILSPNVYTIDKGFNHLSKGFKGQSVSQSYFR | |
| | KISALARGAVVRACHKAIDGRSLGGSLVPRGSGGSAAAYNKTLDCIEILE | |
| | DDLFIMSSKDSFTDTDFSEPSVGPVSYKAKKGADTILDSTLSNYDFSKEIN | |
| | FTSTVPIITVEDPLETDEDVPVISEDRTVYVDDYTTFHFLEAQKIGKEVVPT | |
| | QTKVVFTTNMEEALFDSKKVYTVFENTASRINEAGTGIANGMMFYQWL | |
| | KGIVQDFTEEATQKDTFDKISDVTMIVPYLGNILNIGNDIRKGDFMGAVE | |
| | LGGVTILLEAIPELTLPVLIGLTIIEDELEKEQVSQTVYNVLDKRDEKWEE | |
| | VYGFVKQQWWWMVHTQFETRILHAYQALNHQVEAIKANMTYQLANY | |
| | RGNQEDKELLEKAIDDTLQSLYYAVDQAMHNIKRFLIQSSKSYLLNQML | |
| | PKTKEQLLAFDQQTLRNVNDFINKNQGVLGESLAKDLKKKVEKRLTSLP | |
| | VFNLEDLPISEFEDLIHSHEIDIQDSEVLNIGVNNGKIQDLSGENTPLTLGE | |
| | NLHIINTSILNLRYESNHLIDLSRYASKINIGSKVNFDPIDKNQIQLFNLESS | |
| | KIEVILKNAIVYNSMYENFSTSFWIRIPKYFNSISLNNEYTIINCMENNSGW | |
| | KVSLNYGEIIWTLQDTQEIKQRVVFKYSQMINISDYINRWIFVTITNNRLN | |
| | NSKIYINGRLIDQKPISNLGNIHASNNIMFKLDGCRDTHRYIWIKYFNLFD | |
| | KELNEKEIKDLYDNQSNSGILKDFWGDYLQYDKPYYMLNLYDPNKYVD | |
| | VNNVGIRGYMYLKGPRGSVMTTNIYLNSSLYRGTKFIIKKYASGNKDNIV | |
| | RNNDRVYINVVVKNKEYRLATNASQAGVEKILSALEIPDVGNLSQVVVM | |
| | KSKNDQGITNKCKMNLQDNNGNDIGFIGFHQFNNIAKLVASNWYNRQIE | |
| | RSSRTLGCSWEFIPVDDGWGERPLQ | |
| Anti-BoNT/B VHH | QVQLVESGGGLVQPGGSLRLSCAASGFPFHAYYMSWVRQAPGKGLEWV | 144 |
| (J10)-anti-BoNT/A | SHIGNGGIITRYADSVKGRFTISRDNAKNTLYLQMTNLKPEDTALYYCTL | |
| VHH (A8)- | GTRDDLGPERGQGTQVTVSSEPKTPKPQGGGGSGGGGEFMGTQVQLVE | |
| ciBoNT/PMP1-A | SGGGLVQPGGSLRLSCAASGSIFSIYAMGWYRQAPGKQRELVAAISSYGS | |
| | TNYADSVKGRFTISRDNAKNTVYLQMNSLKPEDTAVYYCNADIATMTA | |
| | VGGFDYWGQGTQVTVSSEPKTPKPQGGGGSGGGGSKLLQIRVFNYNDPI | |
| | DGENIVELRYHNRSPVKAFQIVDGIWIIPERYNFTNDTKKVPDDRALTILE | |
| | DEVFAVRENDYLTTDVNEKNSFLNNITKLFKRINSSNIGNQLLNYISTSVP | |
| | YPVVSTNSIKARDYNTIKFDSIDGRRITKSANVLIYGPSMKNLLDKQTRAI | |
| | NGEEAKNGIGCLSDIIFSPNYLSVQTVSSSRFVEDPASSLTHQLIHALHNLY | |
| | GIQYPGEEKFKFGGFIDKLLGTRECIDYEEVLTYGGKDSEIIRKKIDKSLYP | |
| | DDFVNKYGEMYKRIKGSNPYYPDEKKLKQSFLNRMNPFDQNGTFDTKE | |
| | FKNHLMDLWFGLNESEFAKEKKILVAKHFITKQINPKYTELTNDVYTED | |
| | KGFVNGQSIDNQNFKIIDDLISKKVKLCHKAIDGRSLGGSLVPRGSGGSA | |
| | AAYNKTLDCIDVNKEDLYFISDKEGFENIDFSEPEIRYDSNVTTATTSSFT | |
| | DHFLVNRTFNDSDRFPPVELEYAIEPAEIVDNTIMPDIDQKSEISLDNLTTF | |
| | HYLNAQKMDLGFDSSKEQLKMVTSIEESLLDSKKVYTPFTRTAHSVNERI | |
| | SGIAESYLFYQWLKTVINDFTDELNQKSNTDKVADISWIIPYVGPALNIGL | |
| | DLSHGDFTKAFEDLGVSILFAIAPEFATISLVALSIYENIEEDSQKEKVINK | |
| | VENTLARRIEKWHQVYAFMVAQWWGMVHTQIDTRIHQMYESLSHQIIAI | |
| | KANMEYQLSHYKGPDNDKLLLKDYIYEAEIALNTSANRAMKNIERFMIE | |
| | SSISYLKNNLIPSVVENLKKFDADTKKNLDQFIDKNSSVLGSDLHILKSQV | |
| | DLELNPTTKVAFNIQSIPDFDINALIDRLGIQIINTSILNLRYESNHLIDLSRY | |
| | ASKINIGSKVNFDPIDKNQIQLFNLESSKIEVILKNAIVYNSMYENFSTSFW | |
| | IRIPKYFNSISLNNEYTIINCMENNSGWKVSLNYGEIIWTLQDTQEIKQRV | |
| | VFKYSQMINISDYINRWIFVTITNNRLNNSKIYINGRLIDQKPISNLGNIHA | |
| | SNNIMFKLDGCRDTHRYIWIKYFNLFDKELNEKEIKDLYDNQSNSGILKD | |
| | FWGDYLQYDKPYYMLNLYDPNKYVDVNNVGIRGYMYLKGPRGSVMTT | |
| | NIYLNSSLYRGTKFIIKKYASGNKDNIVRNNDRVYINVVVKNKEYRLATN | |
| | ASQAGVEKILSALEIPDVGNLSQVVVMKSKNDQGITNKCKMNLQDNNG | |
| | NDIGFIGFHQFNNIAKLVASNWYNRQIERSSRTLGCSWEFIPVDDGWGER | |
| | PLQ | |
| TrxA-thrombin | MSDKIIHLTDDSFDTDVLKADGAILVDFWAEWCGPCKMIAPILDEIADEYQG | 145 |
| site-anti-BoNT/A | KLTVAKLNIDQNPGTAPKYGIRGIPTILLFKNGEVAATKVGALSKGQLKEFLD | |
| VHH (A8)- | ANLAGGSLVPRGSGGSEFMGTQVQLVESGGGLVQPGGSLRLSCAASGSIF | |
| ciBoNT/PMP1-A | SIYAMGWYRQAPGKQRELVAAISSYGSTNYADSVKGRFTISRDNAKNTV | |
| | YLQMNSLKPEDTAVYYCNADIATMTAVGGFDYWGQGTQVTVSSEPKTP | |
| | KPQGGGGSGGGGSKLLQIRVFNYNDPIDGENIVELRYHNRSPVKAFQIVD | |
| | GIWIIPERYNFTNDTKKVPDDRALTILEDEVFAVRENDYLTTDVNEKNSF | |
| | LNNITKLFKRINSSNIGNQLLNYISTSVPYPVVSTNSIKARDYNTIKFDSID | |
| | GRRITKSANVLIYGPSMKNLLDKQTRAINGEEAKNGIGCLSDIIFSPNYLS | |
| | VQTVSSSRFVEDPASSLTHQLIHALHNLYGIQYPGEEKFKFGGFIDKLLGT | |
| | RECIDYEEVLTYGGKDSEIIRKKIDKSLYPDDFVNKYGEMYKRIKGSNPY | |
| | YPDEKKLKQSFLNRMNPFDQNGTFDTKEFKNHLMDLWFGLNESEFAKE | |
| | KKILVAKHFITKQINPKYTELTNDVYTEDKGFVNGQSIDNQNFKIIDDLIS | |
| | KKVKLCHKAIDGRSLGGSLVPRGSGGSAAAYNKTLDCIDVNKEDLYFIS | |
| | DKEGFENIDFSEPEIRYDSNVTTATTSSFTDHFLVNRTFNDSDRFPPVELE | |
| | YAIEPAEIVDNTIMPDIDQKSEISLDNLTTFHYLNAQKMDLGFDSSKEQLK | |
| | MVTSTEESLLDSKKVYTPFTRTAHSVNERISGIAESYLFYQWLKTVINDFT | |
| | DELNQKSNTDKVADISWIIPYVGPALNIGLDLSHGDFTKAFEDLGVSILFA | |
| | IAPEFATISLVALSIYENIEEDSQKEKVINKVENTLARRIEKWHQVYAFMV | |
| | AQWWGMVHTQIDTRIHQMYESLSHQIIAIKANMEYQLSHYKGPDNDKL | |
| | LLKDYIYEAEIALNTSANRAMKNIERFMIESSISYLKNNLIPSVVENLKKF | |
| | DADTKKNLDQFIDKNSSVLGSDLHILKSQVDLELNPTTKVAFNIQSIPDFD | |
| | INALIDRLGIQIINTSILNLRYESNHLIDLSRYASKINIGSKVNFDPIDKNQIQ | |
| | LFNLESSKIEVILKNAIVYNSMYENFSTSFWIRIPKYFNSISLNNEYTIINCM | |
| | ENNSGWKVSLNYGEIIWTLQDTQEIKQRVVFKYSQMINISDYINRWIFVTI | |
| | TNNRLNNSKIYINGRLIDQKPISNLGNIHASNNIMFKLDGCRDTHRYIWIK | |
| | YFNLFDKELNEKEIKDLYDNQSNSGILKDFWGDYLQYDKPYYMLNLYD | |
| | PNKYVDVNNVGIRGYMYLKGPRGSVMTTNIYLNSSLYRGTKFIIKKYAS | |
| | GNKDNIVRNNDRVYINVVVKNKEYRLATNASQAGVEKILSALEIPDVGN | |
| | LSQVVVMKSKNDQGITNKCKMNLQDNNGNDIGFIGFHQFNNIAKLVASN | |
| | WYNRQIERSSRTLGCSWEFIPVDDGWGERPLQ | |
| TrxA-thrombin | MSDKIIHLTDDSFDTDVLKADGAILVDFWAEWCGPCKMIAPILDEIADEYQG | 146 |
| site-anti-BoNT/B | KLTVAKLNIDQNPGTAPKYGIRGIPTILLFKNGEVAATKVGALSKGQLKEFLD | |
| VHH (J10)- | ANLAGGSLVPRGSGGSEFQVQLVESGGGLVQPGGSLRLSCAASGFPFHAY | |
| ciBoNT/PMP1-A | YMSWVRQAPGKGLEWVSHIGNGGIITRYADSVKGRFTISRDNAKNTLYL | |
| | QMTNLKPEDTALYYCTLGTRDDLGPERGQGTQVTVSSEPKTPKPQGGGG | |
| | SGGGGSKLLQIRVFNYNDPIDGENIVELRYHNRSPVKAFQIVDGIWIIPER | |
| | YNFTNDTKKVPDDRALTILEDEVFAVRENDYLTTDVNEKNSFLNNITKLF | |
| | KRINSSNIGNQLLNYISTSVPYPVVSTNSIKARDYNTIKFDSIDGRRITKSA | |
| | NVLIYGPSMKNLLDKQTRAINGEEAKNGIGCLSDIIFSPNYLSVQTVSSSR | |
| | FVEDPASSLTHQLIHALHNLYGIQYPGEEKFKFGGFIDKLLGTRECIDYEE | |
| | VLTYGGKDSEIIRKKIDKSLYPDDFVNKYGEMYKRIKGSNPYYPDEKKLK | |
| | QSFLNRMNPFDQNGTFDTKEFKNHLMDLWFGLNESEFAKEKKILVAKHF | |
| | ITKQINPKYTELTNDVYTEDKGFVNGQSIDNQNFKIIDDLISKKVKLCHKA | |
| | IDGRSLGGSLVPRGSGGSAAAYNKTLDCIDVNKEDLYFISDKEGFENIDFS | |
| | EPEIRYDSNVTTATTSSFTDHFLVNRTFNDSDRFPPVELEYAIEPAEIVDNT | |
| | IMPDIDQKSEISLDNLTTFHYLNAQKMDLGFDSSKEQLKMVTSIEESLLDS | |
| | KKVYTPFTRTAHSVNERISGIAESYLFYQWLKTVINDFTDELNQKSNTDK | |
| | VADISWIIPYVGPALNIGLDLSHGDFTKAFEDLGVSILFAIAPEFATISLVA | |
| | LSIYENIEEDSQKEKVINKVENTLARRIEKWHQVYAFMVAQWWGMVHT | |
| | QIDTRIHQMYESLSHQIIAIKANMEYQLSHYKGPDNDKLLLKDYIYEAEIA | |
| | LNTSANRAMKNIERFMIESSISYLKNNLIPSVVENLKKFDADTKKNLDQFI | |
| | DKNSSVLGSDLHILKSQVDLELNPTTKVAFNIQSIPDFDINALIDRLGIQIIN | |
| | TSILNLRYESNHLIDLSRYASKINIGSKVNFDPIDKNQIQLFNLESSKIEVIL | |
| | KNAIVYNSMYENFSTSFWIRIPKYFNSISLNNEYTIINCMENNSGWKVSLN | |
| | YGEIIWTLQDTQEIKQRVVFKYSQMINISDYINRWIFVTITNNRLNNSKIYI | |
| | NGRLIDQKPISNLGNIHASNNIMFKLDGCRDTHRYIWIKYFNLFDKELNE | |
| | KEIKDLYDNQSNSGILKDFWGDYLQYDKPYYMLNLYDPNKYVDVNNV | |
| | GIRGYMYLKGPRGSVMTTNIYLNSSLYRGTKFIIKKYASGNKDNIVRNND | |
| | RVYINVVVKNKEYRLATNASQAGVEKILSALEIPDVGNLSQVVVMKSKN | |
| | DQGITNKCKMNLQDNNGNDIGFIGFHQFNNIAKLVASNWYNRQIERSSR | |
| | TLGCSWEFIPVDDGWGERPLQ | |
| TrxA-thrombin | MSDKIIHLTDDSFDTDVLKADGAILVDFWAEWCGPCKMIAPILDEIADEYQG | 147 |
| site-anti-BoNT/B | KLTVAKLNIDQNPGTAPKYGIRGIPTILLFKNGEVAATKVGALSKGQLKEFLD | |
| VHH (A8)-anti- | ANLAGGSLVPRGSGGSEFMGTQVQLVESGGGLVQPGGSLRLSCAASGSIFSIY | |
| BoNT/B VHH | AMGWYRQAPGKQRELVAAISSYGSTNYADSVKGRFTISRDNAKNTVYLQMNSL | |
| (J10)- | KPEDTAVYYCNADIATMTAVGGFDYWGQGTQVTVSSEPKTPKPQGGGGSGG | |
| ciBoNT/PMP1-A | GGSASQVQLVESGGGLVQPGGSLRLSCAASGFPFHAYYMSWVRQAPGK | |
| | GLEWVSHIGNGGIITRYADSVKGRFTISRDNAKNTLYLQMTNLKPEDTAL | |
| | YYCTLGTRDDLGPERGQGTQVTVSSEPKTPKPQGGGGSGGGGSKLLQIR | |
| | VFNYNDPIDGENIVELRYHNRSPVKAFQIVDGIWIIPERYNFTNDTKKVPD | |
| | DRALTILEDEVFAVRENDYLTTDVNEKNSFLNNITKLFKRINSSNIGNQLL | |
| | NYISTSVPYPVVSTNSIKARDYNTIKFDSIDGRRITKSANVLIYGPSMKNLL | |
| | DKQTRAINGEEAKNGIGCLSDIIFSPNYLSVQTVSSSRFVEDPASSLTHQLI | |
| | HALHNLYGIQYPGEEKFKFGGFIDKLLGTRECIDYEEVLTYGGKDSEIIRK | |
| | KIDKSLYPDDFVNKYGEMYKRIKGSNPYYPDEKKLKQSFLNRMNPFDQN | |
| | GTFDTKEFKNHLMDLWFGLNESEFAKEKKILVAKHFITKQINPKYTELTN | |
| | DVYTEDKGFVNGQSIDNQNFKIIDDLISKKVKLCHKAIDGRSLGGSLVPR | |
| | GSGGSAAAYNKTLDCIDVNKEDLYFISDKEGFENIDFSEPEIRYDSNVTTA | |
| | TTSSFTDHFLVNRTFNDSDRFPPVELEYAIEPAEIVDNTIMPDIDQKSEISL | |
| | DNLTTFHYLNAQKMDLGFDSSKEQLKMVTSIEESLLDSKKVYTPFTRTA | |
| | HSVNERISGIAESYLFYQWLKTVINDFTDELNQKSNTDKVADISWIIPYVG | |
| | PALNIGLDLSHGDFTKAFEDLGVSILFAIAPEFATISLVALSIYENIEEDSQK | |
| | EKVINKVENTLARRIEKWHQVYAFMVAQWWGMVHTQIDTRIHQMYES | |
| | LSHQIIAIKANMEYQLSHYKGPDNDKLLLKDYIYEAEIALNTSANRAMKN | |
| | IERFMIESSISYLKNNLIPSVVENLKKFDADTKKNLDQFIDKNSSVLGSDL | |
| | HILKSQVDLELNPTTKVAFNIQSIPDFDINALIDRLGIQIINTSILNLRYESN | |
| | HLIDLSRYASKINIGSKVNFDPIDKNQIQLFNLESSKIEVILKNAIVYNSMY | |
| | ENFSTSFWIRIPKYFNSISLNNEYTIINCMENNSGWKVSLNYGEIIWTLQDT | |
| | QEIKQRVVFKYSQMINISDYINRWIFVTITNNRLNNSKIYINGRLIDQKPIS | |
| | NLGNIHASNNIMFKLDGCRDTHRYIWIKYFNLFDKELNEKEIKDLYDNQS | |
| | NSGILKDFWGDYLQYDKPYYMLNLYDPNKYVDVNNVGIRGYMYLKGP | |
| | RGSVMTTNIYLNSSLYRGTKFIIKKYASGNKDNIVRNNDRVYINVVVKN | |
| | KEYRLATNASQAGVEKILSALEIPDVGNLSQVVVMKSKNDQGITNKCKM | |
| | NLQDNNGNDIGFIGFHQFNNIAKLVASNWYNRQIERSSRTLGCSWEFIPV | |
| | DDGWGERPLQ | |
| Anti-BoNT/A | MGTQVQLVESGGGLVQPGGSLRLSCAASGSIFSIYAMGWYRQAPGKQRE | 148 |
| VHH (A8)- | LVAAISSYGSTNYADSVKGRFTISRDNAKNTVYLQMNSLKPEDTAVYYC | |
| ciBoNT/PMP1-A | NADIATMTAVGGFDYWGQGTQVTVSSEPKTPKPQGGGGSGGGGSKLLQ | |
| | IRVFNYNDPIDGENIVELRYHNRSPVKAFQIVDGIWIIPERYNFTNDTKKV | |
| | PDDRALTILEDEVFAVRENDYLTTDVNEKNSFLNNITKLFKRINSSNIGNQ | |
| | LLNYISTSVPYPVVSTNSIKARDYNTIKFDSIDGRRITKSANVLIYGPSMKN | |
| | LLDKQTRAINGEEAKNGIGCLSDIIFSPNYLSVQTVSSSRFVEDPASSLTHQ | |
| | LIHALHNLYGIQYPGEEKFKFGGFIDKLLGTRECIDYEEVLTYGGKDSEIIR | |
| | KKIDKSLYPDDFVNKYGEMYKRIKGSNPYYPDEKKLKQSFLNRMNPFDQ | |
| | NGTFDTKEFKNHLMDLWFGLNESEFAKEKKILVAKHFITKQINPKYTELT | |
| | NDVYTEDKGFVNGQSIDNQNFKIIDDLISKKVKLCHKAIDGRSLGGSLVP | |
| | RGSGGSAAAYNKTLDCIDVNKEDLYFISDKEGFENIDFSEPEIRYDSNVTT | |
| | ATTSSFTDHFLVNRTFNDSDRFPPVELEYAIEPAEIVDNTIMPDIDQKSEIS | |
| | LDNLTTFHYLNAQKMDLGFDSSKEQLKMVTSIEESLLDSKKVYTPFTRT | |
| | AHSVNERISGIAESYLFYQWLKTVINDFTDELNQKSNTDKVADISWIIPYV | |
| | GPALNIGLDLSHGDFTKAFEDLGVSILFAIAPEFATISLVALSIYENIEEDSQ | |
| | KEKVINKVENTLARRIEKWHQVYAFMVAQWWGMVHTQIDTRIHQMYE | |
| | SLSHQIIAIKANMEYQLSHYKGPDNDKLLLKDYIYEAEIALNTSANRAMK | |
| | NIERFMIESSISYLKNNLIPSVVENLKKFDADTKKNLDQFIDKNSSVLGSD | |
| | LHILKSQVDLELNPTTKVAFNIQSIPDFDINALIDRLGIQIINTSILNLRYESN | |
| | HLIDLSRYASKINIGSKVNFDPIDKNQIQLFNLESSKIEVILKNAIVYNSMY | |
| | ENFSTSFWIRIPKYFNSISLNNEYTIINCMENNSGWKVSLNYGEIIWTLQDT | |
| | QEIKQRVVFKYSQMINISDYINRWIFVTITNNRLNNSKIYINGRLIDQKPIS | |
| | NLGNIHASNNIMFKLDGCRDTHRYIWIKYFNLFDKELNEKEIKDLYDNQS | |
| | NSGILKDFWGDYLQYDKPYYMLNLYDPNKYVDVNNVGIRGYMYLKGP | |
| | RGSVMTTNIYLNSSLYRGTKFIIKKYASGNKDNIVRNNDRVYINVVVKN | |
| | KEYRLATNASQAGVEKILSALEIPDVGNLSQVVVMKSKNDQGITNKCKM | |
| | NLQDNNGNDIGFIGFHQFNNIAKLVASNWYNRQIERSSRTLGCSWEFIPV | |
| | DDGWGERPLQ | |
| Anti-BoNT/B VHH | QVQLVESGGGLVQPGGSLRLSCAASGFPFHAYYMSWVRQAPGKGLEWV | 149 |
| (J10)- | SHIGNGGIITRYADSVKGRFTISRDNAKNTLYLQMTNLKPEDTALYYCTL | |
| ciBoNT/PMP1-A | GTRDDLGPERGQGTQVTVSSEPKTPKPQGGGGSGGGGSKLLQIRVFNYN | |
| | DPIDGENIVELRYHNRSPVKAFQIVDGIWIIPERYNFTNDTKKVPDDRALT | |
| | ILEDEVFAVRENDYLTTDVNEKNSFLNNITKLFKRINSSNIGNQLLNYISTS | |
| | VPYPVVSTNSIKARDYNTIKFDSIDGRRITKSANVLIYGPSMKNLLDKQTR | |
| | AINGEEAKNGIGCLSDIIFSPNYLSVQTVSSSRFVEDPASSLTHQLIHALHN | |
| | LYGIQYPGEEKFKFGGFIDKLLGTRECIDYEEVLTYGGKDSEIIRKKIDKSL | |
| | YPDDFVNKYGEMYKRIKGSNPYYPDEKKLKQSFLNRMNPFDQNGTFDT | |
| | KEFKNHLMDLWFGLNESEFAKEKKILVAKHFITKQINPKYTELTNDVYTE | |
| | DKGFVNGQSIDNQNFKIIDDLISKKVKLCHKAIDGRSLGGSLVPRGSGGS | |
| | AAAYNKTLDCIDVNKEDLYFISDKEGFENIDFSEPEIRYDSNVTTATTSSF | |
| | TDHFLVNRTFNDSDRFPPVELEYAIEPAEIVDNTIMPDIDQKSEISLDNLTT | |
| | FHYLNAQKMDLGFDSSKEQLKMVTSIEESLLDSKKVYTPFTRTAHSVNE | |
| | RISGIAESYLFYQWLKTVINDFTDELNQKSNTDKVADISWIIPYVGPALNI | |
| | GLDLSHGDFTKAFEDLGVSILFAIAPEFATISLVALSIYENIEEDSQKEKVI | |
| | NKVENTLARRIEKWHQVYAFMVAQWWGMVHTQIDTRIHQMYESLSHQ | |
| | IIAIKANMEYQLSHYKGPDNDKLLLKDYIYEAEIALNTSANRAMKNIERF | |
| | MIESSISYLKNNLIPSVVENLKKFDADTKKNLDQFIDKNSSVLGSDLHILK | |
| | SQVDLELNPTTKVAFNIQSIPDFDINALIDRLGIQIINTSILNLRYESNHLIDL | |
| | SRYASKINIGSKVNFDPIDKNQIQLFNLESSKIEVILKNAIVYNSMYENFST | |
| | SFWIRIPKYFNSISLNNEYTIINCMENNSGWKVSLNYGEIIWTLQDTQEIK | |
| | QRVVFKYSQMINISDYINRWIFVTITNNRLNNSKIYINGRLIDQKPISNLGN | |
| | IHASNNIMFKLDGCRDTHRYIWIKYFNLFDKELNEKEIKDLYDNQSNSGI | |
| | LKDFWGDYLQYDKPYYMLNLYDPNKYVDVNNVGIRGYMYLKGPRGSV | |
| | MTTNIYLNSSLYRGTKFIIKKYASGNKDNIVRNNDRVYINVVVKNKEYRL | |
| | ATNASQAGVEKILSALEIPDVGNLSQVVVMKSKNDQGITNKCKMNLQD | |
| | NNGNDIGFIGFHQFNNIAKLVASNWYNRQIERSSRTLGCSWEFIPVDDGW | |
| | GERPLQ | |
| Anti-BoNT/B VHH | QVQLVESGGGLVQPGGSLRLSCAASGFPFHAYYMSWVRQAPGKGLEWV | 150 |
| (A8)-anti-BoNT/B | SHIGNGGIITRYADSVKGRFTISRDNAKNTLYLQMTNLKPEDTALYYCTL | |
| VHH (J10)- | GTRDDLGPERGQGTQVTVSSEPKTPKPQGGGGSGGGGSKLLQIRVFNYN | |
| ciBoNT/PMP1-A | DPIDGENIVELRYHNRSPVKAFQIVDGIWIIPERYNFTNDTKKVPDDRALT | |
| | ILEDEVFAVRENDYLTTDVNEKNSFLNNITKLFKRINSSNIGNQLLNYISTS | |
| | VPYPVVSTNSIKARDYNTIKFDSIDGRRITKSANVLIYGPSMKNLLDKQTR | |
| | AINGEEAKNGIGCLSDIIFSPNYLSVQTVSSSRFVEDPASSLTHQLIHALHN | |
| | LYGIQYPGEEKFKFGGFIDKLLGTRECIDYEEVLTYGGKDSEIIRKKIDKSL | |
| | YPDDFVNKYGEMYKRIKGSNPYYPDEKKLKQSFLNRMNPFDQNGTFDT | |
| | KEFKNHLMDLWFGLNESEFAKEKKILVAKHFITKQINPKYTELTNDVYTE | |
| | DKGFVNGQSIDNQNFKIIDDLISKKVKLCHKAIDGRSLGGSLVPRGSGGS | |
| | AAAYNKTLDCIDVNKEDLYFISDKEGFENIDFSEPEIRYDSNVTTATTSSF | |
| | TDHFLVNRTFNDSDRFPPVELEYAIEPAEIVDNTIMPDIDQKSEISLDNLTT | |
| | FHYLNAQKMDLGFDSSKEQLKMVTSIEESLLDSKKVYTPFTRTAHSVNE | |
| | RISGIAESYLFYQWLKTVINDFTDELNQKSNTDKVADISWIIPYVGPALNI | |
| | GLDLSHGDFTKAFEDLGVSILFAIAPEFATISLVALSIYENIEEDSQKEKVI | |
| | NKVENTLARRIEKWHQVYAFMVAQWWGMVHTQIDTRIHQMYESLSHQ | |
| | IIAIKANMEYQLSHYKGPDNDKLLLKDYIYEAEIALNTSANRAMKNIERF | |
| | MIESSISYLKNNLIPSVVENLKKFDADTKKNLDQFIDKNSSVLGSDLHILK | |
| | SQVDLELNPTTKVAFNIQSIPDFDINALIDRLGIQIINTSILNLRYESNHLIDL | |
| | SRYASKINIGSKVNFDPIDKNQIQLFNLESSKIEVILKNAIVYNSMYENFST | |
| | SFWIRIPKYFNSISLNNEYTIINCMENNSGWKVSLNYGEIIWTLQDTQEIK | |
| | QRVVFKYSQMINISDYINRWIFVTITNNRLNNSKIYINGRLIDQKPISNLGN | |
| | IHASNNIMFKLDGCRDTHRYIWIKYFNLFDKELNEKEIKDLYDNQSNSGI | |
| | LKDFWGDYLQYDKPYYMLNLYDPNKYVDVNNVGIRGYMYLKGPRGSV | |
| | MTTNIYLNSSLYRGTKFIIKKYASGNKDNIVRNNDRVYINVVVKNKEYRL | |
| | ATNASQAGVEKILSALEIPDVGNLSQVVVMKSKNDQGITNKCKMNLQD | |
| | NNGNDIGFIGFHQFNNIAKLVASNWYNRQIERSSRTLGCSWEFIPVDDGW | |
| | GERPLQ | |

### REFERENCES

[0331] 1. Schiavo, G., Matteoli, M. & Montecucco, C. Neurotoxins affecting neuroexocytosis. Physiol Rev 80, 717-766 (2000).
[0332] 2. Bade, S., Rummel, A., Reisinger, C., Karnath, T., Ahnert-Hilger, G., Bigalke, H. & Binz, T. Botulinum neurotoxin type D enables cytosolic delivery of enzymatically active cargo proteins to neurones via unfolded translocation intermediates. J Neurochem 91, 1461-1472 (2004).
[0333] 3. Vazquez-Cintron, E. J., Beske, P. H., Tenezaca, L., Tran, B. Q., Oyler, J. M., Glotfelty, E. J., Angeles, C. A., Syngkon, A., Mukherjee, J., Kalb, S. R., Band, P. A., McNutt, P. M., Shoemaker, C. B. & Ichtchenko, K. Engineering Botulinum Neurotoxin Cl as a Molecular Vehicle for Intra-Neuronal Drug Delivery. Sci Rep 7, 42923 (2017).
[0334] 4. Montal, M. Botulinum neurotoxin: a marvel of protein design. Annu Rev Biochem 79, 591-617 (2010).
[0335] 5. Webb, R. P., Smith, T. J., Smith, L. A., Wright, P. M., Guernieri, R. L., Brown, J. L. & Skerry, J. C. Recombinant Botulinum Neurotoxin Hc Subunit (BoNT Hc) and Catalytically Inactive Clostridium botulinum Holoproteins (^{ci}BoNT HPs) as Vaccine Candidates for the Prevention of Botulism. Toxins (Basel) 9(2017).
[0336] 6. Zhang, S., Lebreton, F., Mansfield, M. J., Miyashita, S. I., Zhang, J., Schwartzman, J. A., Tao, L., Masuyer, G., Martinez-Carranza, M., Stenmark, P., Gilmore, M. S., Doxey, A. C. & Dong, M. Identification of a Botulinum Neurotoxin-like Toxin in a Commensal Strain of Enterococcus faecium. Cell Host Microbe 23, 169-176 e166 (2018).
[0337] 7. Zhang, S., Masuyer, G., Zhang, J., Shen, Y., Lundin, D., Henriksson, L., Miyashita, S. I., Martinez-Carranza, M., Dong, M. & Stenmark, P. Identification and characterization of a novel botulinum neurotoxin. Nat Commun 8, 14130 (2017).
[0338] 8. Tremblay, J. M., Kuo, C. L., Abeijon, C., Sepulveda, J., Oyler, G., Hu, X., Jin, M. M. & Shoemaker, C. B. Camelid single domain antibodies (VHHs) as neuronal cell intrabody binding agents and inhibitors of Clostridium botulinum neurotoxin (BoNT) proteases. Toxicon 56, 990-998 (2010).
[0339] 9. Peng, L., Tepp, W. H., Johnson, E. A. & Dong, M. Botulinum neurotoxin D uses synaptic vesicle protein SV2 and gangliosides as receptors. PLoS Pathog 7, e1002008 (2011).
[0340] 10. M. Dong, G. Masuyer, P. Stenmark, Botulinum and Tetanus Neurotoxins. Annual review of biochemistry 88, 811-837 (2019).
[0341] 11. M. Pirazzini, O. Rossetto, R. Eleopra, C. Montecucco, Botulinum Neurotoxins: Biology, Pharmacology, and Toxicology. Pharmacol Rev 69, 200-235 (2017).
[0342] 12. O. Rossetto, M. Pirazzini, C. Montecucco, Botulinum neurotoxins: genetic, structural and mechanistic insights. Nat Rev Microbiol 12, 535-549 (2014).
[0343] 13. M. Montal, Botulinum neurotoxin: a marvel of protein design. Annual review of biochemistry 79, 591-617 (2010).
[0344] 14. A. Rummel, The long journey of botulinum neurotoxins into the synapse. Toxicon 107, 9-24 (2015).
[0345] 15. G. Schiavo, M. Matteoli, C. Montecucco, Neurotoxins affecting neuroexocytosis. Physiological reviews 80, 717-766 (2000).
[0346] 16. S. S. Arnon, R. Schechter, T. V. Inglesby, D. A. Henderson, J. G. Bartlett, M. S. Ascher, E. Eitzen, A. D. Fine, J. Hauer, M. Layton, S. Lillibridge, M. T. Osterholm, T. O'Toole, G. Parker, T. M. Perl, P. K. Russell, D. L. Swerdlow, K. Tonat, Botulinum toxin as a biological weapon: medical and public health management. Jama 285, 1059-1070 (2001).
[0347] 17. C. L. Hatheway, in Clostridial neurotoxins, C. Montecucco, Ed. (Springer-Verlag, Berlin, 1995), vol. 195, pp. 55-75.
[0348] 18. J. Sobel, Botulism. Clin Infect Dis 41, 1167-1173 (2005).
[0349] 19. J. E. Keller, E. A. Neale, G. Oyler, M. Adler, Persistence of botulinum neurotoxin action in cultured spinal cord cells. FEBS Lett 456, 137-142 (1999).
[0350] 20. R. C. Whitemarsh, W. H. Tepp, E. A. Johnson, S. Pellett, Persistence of botulinum neurotoxin a subtypes 1-5 in primary rat spinal cord cells. PLoS ONE 9, e90252 (2014).
[0351] 21. Y. C. Tsai, A. Kotiya, E. Kiris, M. Yang, S. Bavari, L. Tessarollo, G. A. Oyler, A. M. Weissman, Deubiquitinating enzyme VCIP135 dictates the duration of botulinum neurotoxin type A intoxication. Proceedings of the National Academy of Sciences of the United States of America 114, E5158-E5166 (2017).
[0352] 22. S. Pellett, W. H. Tepp, R. C. Whitemarsh, M. Bradshaw, E. A. Johnson, In vivo onset and duration of action varies for botulinum neurotoxin A subtypes 1-5. Toxicon 107, 37-42 (2015).
[0353] 23. P. G. Foran, N. Mohammed, G. O. Lisk, S. Nagwaney, G. W. Lawrence, E. Johnson, L. Smith, K. R. Aoki, J. O. Dolly, Evaluation of the therapeutic usefulness of botulinum neurotoxin B, Cl, E, and F compared with the long lasting type A. Basis for distinct durations of inhibition of exocytosis in central neurons. The Journal of biological chemistry 278, 1363-1371 (2003).
[0354] 24. A. Nowakowski, C. Wang, D. B. Powers, P. Amersdorfer, T. J. Smith, V. A. Montgomery, R. Sheridan, R. Blake, L. A. Smith, J. D. Marks, Potent neutralization of botulinum neurotoxin by recombinant oligoclonal antibody. Proceedings of the National Academy of Sciences of the United States of America 99, 11346-11350 (2002).
[0355] 25. S. S. Arnon, R. Schechter, S. E. Maslanka, N. P. Jewell, C. L. Hatheway, Human botulism immune globulin for the treatment of infant botulism. The New England journal of medicine 354, 462-471 (2006).
[0356] 26. S. Kodihalli, A. Emanuel, T. Takla, Y. Hua, C. Hobbs, R. LeClaire, D. C. O'Donnell, Therapeutic efficacy of equine botulism antitoxin in Rhesus macaques. PLoS ONE 12, e0186892 (2017).
[0357] 27. P. A. Yu, N. H. Lin, B. E. Mahon, J. Sobel, Y. Yu, R. K. Mody, W. Gu, J. Clements, H. J. Kim, A. K. Rao, Safety and Improved Clinical Outcomes in Patients Treated With New Equine-Derived Heptavalent Botulinum Antitoxin. Clin Infect Dis 66, S57-S64 (2017).
[0358] 28. E. A. Johnson, Clostridial toxins as therapeutic agents: benefits of nature's most toxic proteins. Annu Rev Microbiol 53, 551-575 (1999).
[0359] 29. T. C. Sudhof, J. E. Rothman, Membrane fusion: grappling with SNARE and SM proteins. Science (New York, N.Y. 323, 474-477 (2009).
[0360] 30. R. Jahn, R. H. Scheller, SNAREs—engines for membrane fusion. Nature reviews 7, 631-643 (2006).
[0361] 31. S. Bade, A. Rummel, C. Reisinger, T. Karnath, G. Ahnert-Hilger, H. Bigalke, T. Binz, Botulinum neurotoxin type D enables cytosolic delivery of enzymatically active cargo proteins to neurones via unfolded translocation intermediates. Journal of neurochemistry 91, 1461-1472 (2004).
[0362] 32. M. C. Goodnough, G. Oyler, P. S. Fishman, E. A. Johnson, E. A. Neale, J. E. Keller, W. H. Tepp, M. Clark, S. Hartz, M. Adler, Development of a delivery vehicle for intracellular transport of botulinum neurotoxin antagonists. FEBS Lett 513, 163-168 (2002).
[0363] 33. M. Ho, L. H. Chang, M. Pires-Alves, B. Thyagarajan, J. E. Bloom, Z. Gu, K. K. Aberle, S. A. Teymorian, Y. Bannai, S. C. Johnson, J. J. McArdle, B. A. Wilson, Recombinant botulinum neurotoxin A heavy chain-based delivery vehicles for neuronal cell targeting. Protein Eng Des Sel 24, 247-253 (2011).
[0364] 34. P. A. Band, S. Blais, T. A. Neubert, T. J. Cardozo, K. Ichtchenko, Recombinant derivatives of botulinum neurotoxin A engineered for trafficking studies and neuronal delivery. Protein expression and purification 71, 62-73 (2010).
[0365] 35. G. Schiavo, B. Poulain, O. Rossetto, F. Benfenati, L. Tauc, C. Montecucco, Tetanus toxin is a zinc protein and its inhibition of neurotransmitter release and protease activity depend on zinc. The EMBO journal 11, 3577-3583 (1992).
[0366] 36. T. Binz, S. Bade, A. Rummel, A. Kollewe, J. Alves, Arg(362) and Tyr(365) of the botulinum neurotoxin type a light chain are involved in transition state stabilization. Biochemistry 41, 1717-1723 (2002).
[0367] 37. E. J. Vazquez-Cintron, P. H. Beske, L. Tenezaca, B. Q. Tran, J. M. Oyler, E. J. Glotfelty, C. A. Angeles, A. Syngkon, J. Mukherjee, S. R. Kalb, P. A. Band, P. M. McNutt, C. B. Shoemaker, K. Ichtchenko, Engineering Botulinum Neurotoxin Cl as a Molecular Vehicle for Intra-Neuronal Drug Delivery. Sci Rep 7, 42923 (2017).
[0368] 38. S. Pellett, W. H. Tepp, L. H. Stanker, P. A. Band, E. A. Johnson, K. Ichtchenko, Neuronal targeting, internalization, and biological activity of a recombinant atoxic derivative of botulinum neurotoxin A. Biochemical and biophysical research communications 405, 673-677 (2011).
[0369] 39. R. P. Webb, T. J. Smith, L. A. Smith, P. M. Wright, R. L. Guernieri, J. L. Brown, J. C. Skerry, Recombinant Botulinum Neurotoxin Hc Subunit (BoNT Hc) and Catalytically Inactive Clostridium botulinum Holoproteins (^{ci}BoNT HPs) as Vaccine Candidates for the Prevention of Botulism. Toxins (Basel) 9, (2017).
[0370] 40. S. Zhang, G. Masuyer, J. Zhang, Y. Shen, D. Lundin, L. Henriksson, S. I. Miyashita, M. Martinez-Carranza, M. Dong, P. Stenmark, Identification and characterization of a novel botulinum neurotoxin. Nat Commun 8, 14130 (2017).
[0371] 41. C. L. Kuo, G. A. Oyler, C. B. Shoemaker, Accelerated neuronal cell recovery from Botulinum neurotoxin intoxication by targeted ubiquitination. PLoS ONE 6, e20352 (2011).
[0372] 42. J. M. Tremblay, C. L. Kuo, C. Abeijon, J. Sepulveda, G. Oyler, X. Hu, M. M. Jin, C. B. Shoemaker, Camelid single domain antibodies (VHHs) as neuronal cell intrabody binding agents and inhibitors of Clostridium botulinum neurotoxin (BoNT) proteases. Toxicon 56, 990-998 (2010).
[0373] 43. M. Pirazzini, D. Azarnia Tehran, G. Zanetti, A. Megighian, M. Scorzeto, S. Fillo, C. C. Shone, T. Binz, O. Rossetto, F. Lista, C. Montecucco, Thioredoxin and its reductase are present on synaptic vesicles, and their inhibition prevents the paralysis induced by botulinum neurotoxins. Cell Rep 8, 1870-1878 (2014).
[0374] 44. M. W. Popp, J. M. Antos, G. M. Grotenbreg, E. Spooner, H. L. Ploegh, Sortagging: a versatile method for protein labeling. Nat Chem Biol 3, 707-708 (2007).
[0375] 45. J. Blasi, E. R. Chapman, E. Link, T. Binz, S. Yamasaki, P. De Camilli, T. C. Sudhof, H. Niemann, R. Jahn, Botulinum neurotoxin A selectively cleaves the synaptic protein SNAP-25. Nature 365, 160-163 (1993).
[0376] 46. G. Schiavo, A. Santucci, B. R. Dasgupta, P. P. Mehta, J. Jontes, F. Benfenati, M. C. Wilson, C. Montecucco, Botulinum neurotoxins serotypes A and E cleave SNAP-25 at distinct COOH-terminal peptide bonds. FEBS Lett 335, 99-103 (1993).
[0377] 47. M. Dong, F. Yeh, W. H. Tepp, C. Dean, E. A. Johnson, R. Janz, E. R. Chapman, SV2 is the protein receptor for botulinum neurotoxin A. Science (New York, N.Y. 312, 592-596 (2006).
[0378] 48. S. Mahrhold, A. Rummel, H. Bigalke, B. Davletov, T. Binz, The synaptic vesicle protein 2C mediates the uptake of botulinum neurotoxin A into phrenic nerves. FEBS Lett 580, 2011-2014 (2006).
[0379] 49. L. Peng, H. Liu, H. Ruan, W. H. Tepp, W. H. Stoothoff, R. H. Brown, E. A. Johnson, W. D. Yao, S. C. Zhang, M. Dong, Cytotoxicity of botulinum neurotoxins reveals a direct role of syntaxin 1 and SNAP-25 in neuron survival. Nat Commun 4, 1472 (2013).
[0380] 50. S. Pellett, W. H. Tepp, J. M. Scherf, E. A. Johnson, Botulinum Neurotoxins Can Enter Cultured Neurons Independent of Synaptic Vesicle Recycling. PLoS ONE 10, e0133737 (2015).
[0381] 51. K. R. Aoki, A comparison of the safety margins of botulinum neurotoxin serotypes A, B, and F in mice. Toxicon 39, 1815-1820 (2001).
[0382] 52. S. Zhang, F. Lebreton, M. J. Mansfield, S. I. Miyashita, J. Zhang, J. A. Schwartzman, L. Tao, G. Masuyer, M. Martinez-Carranza, P. Stenmark, M. S. Gilmore, A. C. Doxey, M. Dong, Identification of a Botulinum Neurotoxin-like Toxin in a Commensal Strain of Enterococcus faecium. Cell Host Microbe 23, 169-176 e166 (2018).
[0383] 53. J. Brunt, A. T. Carter, S. C. Stringer, M. W. Peck, Identification of a novel botulinum neurotoxin gene cluster in Enterococcus. FEBS Lett 592, 310-317 (2018).
[0384] 54. E. Contreras, G. Masuyer, N. Qureshi, S. Chawla, H. S. Dhillon, H. L. Lee, J. Chen, P. Stenmark, S. S. Gill, A neurotoxin that specifically targets Anopheles mosquitoes. Nat Commun 10, 2869 (2019).
[0385] 55. Z. Yang, D. Schmidt, W. Liu, S. Li, L. Shi, J. Sheng, K. Chen, H. Yu, J. M. Tremblay, X. Chen, K. H. Piepenbrink, E. J. Sundberg, C. P. Kelly, G. Bai, C. B. Shoemaker, H. Feng, A novel multivalent, single-domain antibody targeting TcdA and TcdB prevents fulminant Clostridium difficile infection in mice. J Infect Dis 210, 964-972 (2014).
[0386] 56. A. R. Schneekloth, M. Pucheault, H. S. Tae, C. M. Crews, Targeted intracellular protein degradation induced by a small molecule: En route to chemical proteomics. Bioorg Med Chem Lett 18, 5904-5908 (2008).
[0387] 57. S. L. Paiva, C. M. Crews, Targeted protein degradation: elements of PROTAC design. Curr Opin Chem Biol 50, 111-119 (2019).
[0388] 58. E. Caussinus, O. Kanca, M. Affolter, Fluorescent fusion protein knockout mediated by anti-GFP nanobody. Nature structural & molecular biology 19, 117-121 (2011).
[0389] 59. N. Yamaguchi, T. Colak-Champollion, H. Knaut, zGrad is a nanobody-based degron system that inactivates proteins in zebrafish. Elife 8, (2019).
[0390] 60. S. Nagarkar-Jaiswal, P. T. Lee, M. E. Campbell, K. Chen, S. Anguiano-Zarate, M. C. Gutierrez, T. Busby, W. W. Lin, Y. He, K. L. Schulze, B. W. Booth, M. Evans-Holm, K. J. Venken, R. W. Levis, A. C. Spradling, R. A. Hoskins, H. J. Bellen, A library of MiMICs allows tagging of genes and reversible, spatial and temporal knockdown of proteins in Drosophila. Elife 4, (2015).
[0391] 61. S. Wang, N. H. Tang, P. Lara-Gonzalez, Z. Zhao, D. K. Cheerambathur, B. Prevo, A. D. Chisholm, A. Desai, K. Oegema, A toolkit for GFP-mediated tissue-specific protein degradation in C. elegans. Development 144, 2694-2701 (2017).
[0392] 62. Y. J. Shin, S. K. Park, Y. J. Jung, Y. N. Kim, K. S. Kim, 0. K. Park, S. H. Kwon, S. H. Jeon, A. Trinh le, S. E. Fraser, Y. Kee, B. J. Hwang, Nanobody-targeted E3-ubiquitin ligase complex degrades nuclear proteins. Sci Rep 5, 14269 (2015).
[0393] 63. E. Contreras, G. Masuyer, N. Qureshi, S. Chawla, H. Dhillon, H. Lee, J. Chen, P. Stenmark, S. Gill, A neurotoxin that specifically targets Anopheles mosquitoes. Nat Commun 10 (1), 2869 (2019).

[0394] All publications, patents, patent applications, publication, and database entries (e.g., sequence database entries) mentioned herein, e.g., in the Background, Summary, Detailed Description, Examples, and/or References sections, are hereby incorporated by reference in their entirety as if each individual publication, patent, patent application, publication, and database entry was specifically and individually incorporated herein by reference. In case of conflict, the present application, including any definitions herein, will control.

### EQUIVALENTS AND SCOPE

[0395] Those skilled in the art will recognize, or be able to ascertain using no more than routine experimentation, many equivalents of the embodiments described herein. The scope of the present disclosure is not intended to be limited to the above description, but rather is as set forth in the appended claims.

[0396] Articles such as “a,” “an,” and “the” may mean one or more than one unless indicated to the contrary or otherwise evident from the context. Claims or descriptions that include “or” between two or more members of a group are considered satisfied if one, more than one, or all of the group members are present, unless indicated to the contrary or otherwise evident from the context. The disclosure of a group that includes “or” between two or more group members provides embodiments in which exactly one member of the group is present, embodiments in which more than one members of the group are present, and embodiments in which all of the group members are present. For purposes of brevity those embodiments have not been individually spelled out herein, but it will be understood that each of these embodiments is provided herein and may be specifically claimed or disclaimed.

[0397] It is to be understood that the disclosure encompasses all variations, combinations, and permutations in which one or more limitation, element, clause, or descriptive term, from one or more of the claims or from one or more relevant portion of the description, is introduced into another claim. For example, a claim that is dependent on another claim can be modified to include one or more of the limitations found in any other claim that is dependent on the same base claim. Furthermore, where the claims recite a composition, it is to be understood that methods of making or using the composition according to any of the methods of making or using disclosed herein or according to methods known in the art, if any, are included, unless otherwise indicated or unless it would be evident to one of ordinary skill in the art that a contradiction or inconsistency would arise.

[0398] Where elements are presented as lists, e.g., in Markush group format, it is to be understood that every possible subgroup of the elements is also disclosed, and that any element or subgroup of elements can be removed from the group. It is also noted that the term “comprising” is intended to be open and permits the inclusion of additional elements or steps. It should be understood that, in general, where an embodiment, product, or method is referred to as comprising particular elements, features, or steps, embodiments, products, or methods that consist, or consist essentially of, such elements, features, or steps, are provided as well. For purposes of brevity those embodiments have not been individually spelled out herein, but it will be understood that each of these embodiments is provided herein and may be specifically claimed or disclaimed.

[0399] Where ranges are given, endpoints are included. Furthermore, it is to be understood that unless otherwise indicated or otherwise evident from the context and/or the understanding of one of ordinary skill in the art, values that are expressed as ranges can assume any specific value within the stated ranges in some embodiments, to the tenth of the unit of the lower limit of the range, unless the context clearly dictates otherwise. For purposes of brevity, the values in each range have not been individually spelled out herein, but it will be understood that each of these values is provided herein and may be specifically claimed or disclaimed. It is also to be understood that unless otherwise indicated or otherwise evident from the context and/or the understanding of one of ordinary skill in the art, values expressed as ranges can assume any subrange within the given range, wherein the endpoints of the subrange are expressed to the same degree of accuracy as the tenth of the unit of the lower limit of the range.

[0400] Where websites are provided, URL addresses are provided as non-browser-executable codes, with periods of the respective web address in parentheses. The actual web addresses do not contain the parentheses.

[0401] In addition, it is to be understood that any particular embodiment of the present disclosure may be explicitly excluded from any one or more of the claims. Where ranges are given, any value within the range may explicitly be excluded from any one or more of the claims. Any embodiment, element, feature, application, or aspect of the compositions and/or methods of the disclosure, can be excluded from any one or more claims. For purposes of brevity, all of the embodiments in which one or more elements, features, purposes, or aspects is excluded are not set forth explicitly herein.

What is claimed is:

1. A catalytically inactive neurotoxin (BoNT) from Clostridium botulinum, serotype X (BoNT/X) comprising an inactive protease domain and a translocation domain.

2. The catalytically inactive BoNT/X of claim 1, wherein the inactive protease domain comprises one or more substitution mutation(s) in a position corresponding to R360, Y363, H227, E228, or H231 in SEQ ID NO: 1.

3. The catalytically inactive BoNT/X of claim 2, wherein the inactive protease domain comprises amino acid substitutions corresponding to E228Q, R360A, and Y363F in SEQ ID NO: 1.

4. The catalytically inactive BoNT/X of any one of claims 1-3, comprising the amino acid sequence of any one of SEQ ID NO: 3 or SEQ ID NO: 21.

5. A catalytically inactive neurotoxin from Enterococcus faecium (BoNT/En) comprising an inactive protease domain and a translocation domain.

6. The catalytically inactive BoNT/En of claim 5, wherein the inactive protease domain comprises one or more substitution mutation(s) in a position corresponding to H225, E226, H229, R364, or Y367 in SEQ ID NO: 2.

7. The catalytically inactive BoNT/En of claim 6, wherein the inactive protease domain comprises amino acid substitutions corresponding to E226Q, R364A, and Y367F in SEQ ID NO: 2.

8. The catalytically inactive BoNT/En of any one of claims 5-7, comprising the amino acid sequence of any one of SEQ ID NO: 4 or SEQ ID NO: 22.

9. A catalytically inactive neurotoxin from Paraclostridium bifermentans (BoNT/PMP1) comprising an inactive protease domain and a translocation domain.

10. The catalytically inactive BoNT/PMP1 of claim 9, wherein the inactive protease domain comprises one or more substitution mutation(s) in a position corresponding to H208, E209, H212, R344, or Y347 in SEQ ID NO: 85.

11. The catalytically inactive BoNT/PMP1 of claim 10, wherein the inactive protease domain comprises amino acid substitutions corresponding to E209Q, R344A, and Y347F in SEQ ID NO: 85.

12. The catalytically inactive BoNT of any one of claims 9-11, comprising the amino acid sequence of any one of SEQ ID NO: 86 or SEQ ID NO: 95.

13. A chimeric Clostridium botulinum neurotoxin (BoNT) comprising:
(a) a light chain comprising an inactive protease domain,
(b) a heavy chain comprising:
(i) a translocation domain, and
(ii) a receptor binding domain,
wherein (a) and (b)(i) are from a neurotoxin in Clostridium botulinum, serotype X, Enterococcus faecium or Paraclostridium bifermentans, and wherein (b)(ii) is from a BoNT in Clostridium botulinum, serotype A, B, C, D, E, F, G or H.

14. The chimeric BoNT of claim 13, comprising a modified linker between (a) and (b)(i).

15. The chimeric BoNT of claim 14, wherein the modified linker comprises a protease cleavage site.

16. The chimeric BoNT of any one of claims 13-15, wherein (a) and (b)(i) are from a neurotoxin in Clostridium botulinum, serotype X.

17. The chimeric BoNT of claim 16, wherein the inactive protease domain comprises one or more substitution mutation(s) in a position corresponding to R360, Y363, H227, E228, or H231 in SEQ ID NO: 1.

18. The chimeric BoNT of claim 17, wherein the inactive protease domain comprises amino acid substitutions corresponding to E228Q, R360A, and Y363F in SEQ ID NO: 1.

19. The chimeric BoNT of any one of claims 16-18, wherein the b(ii) is from BoNT in Clostridium botulinum, serotype A (BoNT/A).

20. The chimeric BoNT of any one of claims 16-18, wherein b(ii) is from BoNT in Clostridium botulinum, serotype B (BoNT/B).

21. The chimeric BoNT of any one of claims 16-18, wherein b(ii) is from BoNT in Clostridium botulinum, serotype C (BoNT/C).

22. The chimeric BoNT of any one of claims 16-18, wherein b(ii) is from BoNT in Clostridium botulinum, serotype D (BoNT/D).

23. The chimeric BoNT of any one of claims 16-18, wherein b(ii) is from BoNT in Clostridium botulinum, serotype E (BoNT/E).

24. The chimeric BoNT of any one of claims 16-18, wherein b(ii) is from BoNT in Clostridium botulinum, serotype F (BoNT/F).

25. The chimeric BoNT of any one of claims 16-18, wherein b(ii) is from BoNT in Clostridium botulinum, serotype G (BoNT/G).

26. The chimeric BoNT of any one of claims 16-18, wherein b(ii) is from BoNT in Clostridium botulinum, serotype H (BoNT/H).

27. The chimeric BoNT of any one of claims 16-26, wherein the chimeric BoNT comprises an amino acid sequence that is at least 85%, at least 86%, at least 87%, at least 88%, at least 89%, at least 90%, at least 91%, at least 92%, at least 93%, at least 94%, at least 95%, at least 96%, at least 97%, at least 98%, at least 99%, or at least 99.5% identical to the amino acid sequence of any one of SEQ ID NOs: 5-12 and 23-30, and comprises amino acid substitutions corresponding to E228Q, R360A, and Y363F in SEQ ID NO: 1.

28. The chimeric BoNT of claim 27, wherein the chimeric BoNT comprises the amino acid sequence of any one of SEQ ID NOs: 5-12 and 23-30.

29. The chimeric BoNT of claim 28, wherein the chimeric BoNT consists of the amino acid sequence of any one of SEQ ID NOs: 5-12 and 23-30.

30. The chimeric BoNT of any one of claims 13-15, wherein (a) and (b)(i) are from a neurotoxin in Enterococcus faecium.

31. The chimeric BoNT of claim 30, wherein the inactive protease domain comprises one or more substitution mutation(s) in a position corresponding to H225, E226, H229, R364, or Y367 in SEQ ID NO: 2.

32. The chimeric BoNT of claim 31, wherein the inactive protease domain comprises amino acid substitutions corresponding to E226Q, R364A, or Y367F in SEQ ID NO: 2.

33. The chimeric BoNT of any one of claims 30-32, wherein b(ii) is from BoNT in Clostridium botulinum, serotype A (BoNT/A).

34. The chimeric BoNT of any one of claims 30-32, wherein b(ii) is from BoNT in Clostridium botulinum, serotype B (BoNT/B).

35. The chimeric BoNT of any one of claims 30-32, wherein b(ii) is from BoNT in Clostridium botulinum, serotype C (BoNT/C).

36. The chimeric BoNT of any one of claims 30-32, wherein b(ii) is from BoNT in Clostridium botulinum, serotype D (BoNT/D).

37. The chimeric BoNT of any one of claims 30-32, wherein b(ii) is from BoNT in Clostridium botulinum, serotype E (BoNT/E).

38. The chimeric BoNT of any one of claims 30-32, wherein b(ii) is from BoNT in Clostridium botulinum, serotype F (BoNT/F).

39. The chimeric BoNT of any one of claims 30-32, wherein b(ii) is from BoNT in Clostridium botulinum, serotype G (BoNT/G).

40. The chimeric BoNT of any one of claims 30-32, wherein b(ii) is from BoNT in Clostridium botulinum, serotype H (BoNT/H).

41. The chimeric BoNT of any one of claims 30-40, wherein the chimeric BoNT comprises an amino acid sequence that is at least 85%, at least 86%, at least 87%, at least 88%, at least 89%, at least 90%, at least 91%, at least 92%, at least 93%, at least 94%, at least 95%, at least 96%, at least 97%, at least 98%, at least 99%, or at least 99.5% identical to the amino acid sequence of any one of SEQ ID NOs: 13-20 and 31-38, and comprises amino acid substitutions corresponding to E226Q, R364A, and Y367F in SEQ ID NO: 2.

42. The chimeric BoNT of claim 41, wherein the chimeric BoNT comprises the amino acid sequence of any one of SEQ ID NOs: 13-20 and 31-38.

43. The chimeric BoNT of claim 42, wherein the chimeric BoNT consists of the amino acid sequence of any one of SEQ ID NOs: 13-20 and 31-38.

44. The chimeric BoNT of any one of claims 13-15, wherein (a) and (b)(i) are from a neurotoxin in Paraclostridium bifermentans.

45. The chimeric BoNT of claim 44, wherein the inactive protease domain comprises one or more substitution mutation(s) in a position corresponding to H208, E209, H212, R344, or Y347 in SEQ ID NO: 85.

46. The chimeric BoNT of claim 45, wherein the inactive protease domain comprises amino acid substitutions corresponding to E209Q, R344A, and Y347F in SEQ ID NO: 85.

47. The chimeric BoNT of any one of claims 44-46, wherein b(ii) is from BoNT in Clostridium botulinum, serotype A (BoNT/A).

48. The chimeric BoNT of any one of claims 44-46, wherein b(ii) is from BoNT in Clostridium botulinum, serotype B (BoNT/B).

49. The chimeric BoNT of any one of claims 44-46, wherein b(ii) is from BoNT in Clostridium botulinum, serotype C (BoNT/C).

50. The chimeric BoNT of any one of claims 44-46, wherein b(ii) is from BoNT in Clostridium botulinum, serotype D (BoNT/D).

51. The chimeric BoNT of any one of claims 44-46, wherein b(ii) is from BoNT in Clostridium botulinum, serotype E (BoNT/E).

52. The chimeric BoNT of any one of claims 44-46, wherein b(ii) is from BoNT in Clostridium botulinum, serotype F (BoNT/F).

53. The chimeric BoNT of any one of claims 44-46, wherein b(ii) is from BoNT in Clostridium botulinum, serotype G (BoNT/G).

54. The chimeric BoNT of any one of claims 44-46, wherein b(ii) is from BoNT in Clostridium botulinum, serotype H (BoNT/H).

55. The chimeric BoNT of any one of claims 44-54, wherein the chimeric BoNT comprises an amino acid sequence that is at least 85%, at least 86%, at least 87%, at least 88%, at least 89%, at least 90%, at least 91%, at least 92%, at least 93%, at least 94%, at least 95%, at least 96%, at least 97%, at least 98%, at least 99%, or at least 99.5% identical to the amino acid sequence of any one of SEQ ID NOs: 87-94 and 96-103, and comprises amino acid substitutions corresponding to E209Q, R344A, and Y347F in SEQ ID NO: 85.

56. The chimeric BoNT of claim 41, wherein the chimeric BoNT comprises the amino acid sequence of any one of SEQ ID NOs: 87-94 and 96-103.

57. The chimeric BoNT of claim 42, wherein the chimeric BoNT consists of the amino acid sequence of any one of SEQ ID NOs: 87-94 and 96-103.

58. The chimeric BoNT of any one of claims 13-26, 30-40, and 44-54, wherein the light chain and the heavy chain are linked by a di-sulfide bond.

59. A nucleic acid encoding the catalytically inactive BoNT/X of any one of claims 1-4, the catalytically inactive BoNT/EN of any one of claims 5-7, the catalytically inactive BoNT/PMP1 of claims 9-12, or chimeric BoNT of any one of claims 13-57.

60. A vector comprising the nucleic acid of claim 59.

61. A cell comprising the catalytically inactive BoNT/X of any one of claims 1-4, the catalytically inactive BoNT/EN of any one of claims 5-7, the catalytically inactive BoNT/PMP1 of claims 9-12, chimeric BoNT of any one of claims 13-57, the nucleic acid of claim 59, or the vector of claim 60.

62. A composition comprising the catalytically inactive BoNT/X of any one of claims 1-4, the catalytically inactive BoNT/EN of any one of claims 5-7, the catalytically inactive BoNT/PMP1 of claims 9-12, or the chimeric BoNT of any one of claims 13-57.

63. The composition of claim 62, wherein the composition is a pharmaceutical composition.

64. The composition of claim 63, further comprising a pharmaceutically acceptable carrier.

65. Use of the catalytically inactive BoNT/X of any one of claims 1-4, the catalytically inactive BoNT/EN of any one of claims 5-7, the catalytically inactive BoNT/PMP1 of claims 9-12, or the chimeric BoNT of any one of claims 13-57 as a delivery vehicle.

66. A complex comprising the catalytically inactive BoNT/X of any one of claims 1-4, the catalytically inactive BoNT/EN of any one of claims 5-7, the catalytically inactive BoNT/PMP1 of claims 9-12, or the chimeric BoNT of any one of claims 13-57 associated with an agent.

67. The complex of claim 66, wherein the agent is associate with the catalytically inactive BoNT/X, the catalytically inactive BoNT/En, the catalytically inactive BoNT/PMP1, or the chimeric BoNT non-covalently.

68. The complex of claim 66, wherein the agent is fused to the catalytically inactive BoNT/X, the catalytically inactive BoNT/EN, the catalytically inactive BoNT/PMP1, or the chimeric BoNT via a covalent bond.

69. The complex of claim 68, wherein the agent is associated with the light chain or the heavy chain of the catalytically inactive BoNT/X, the catalytically inactive BoNT/En, the catalytically inactive BoNT/PMP1, or the chimeric BoNT.

70. A complex comprising a chimeric BoNT associated with an agent, wherein the BoNT comprises:
(a) a light chain comprising an inactive protease domain,
(b) a heavy chain comprising:
(i) a translocation domain, and
(ii) a receptor binding domain,
wherein (a) and (b)(i) are from a neurotoxin in Clostridium botulinum, serotype X, and wherein (b)(ii) is from a BoNT in Clostridium botulinum, serotype A, B, C, D, E, F, G, or H,
and wherein the light chain and the heavy chain are linked via a disulfide bond.

71. A complex comprising a chimeric BoNT associated with an agent, wherein the BoNT comprises:
(a) a light chain comprising an inactive protease domain,
(b) a heavy chain comprising:
(i) a translocation domain, and
(ii) a receptor binding domain,
wherein (a) and (b)(i) are from a neurotoxin in Enterococcus faecium, and wherein (b)(ii) is from a BoNT in Clostridium botulinum, serotype A, B, C, D, E, F, G, or H,
and wherein the light chain and the heavy chain are linked via a disulfide bond.

72. A complex comprising a chimeric BoNT associated with an agent, wherein the BoNT comprises:
(a) a light chain comprising an inactive protease domain,
(b) a heavy chain comprising:
(i) a translocation domain, and
(ii) a receptor binding domain,
wherein (a) and (b)(i) are from a neurotoxin in Enterococcus faecium, and wherein (b)(ii) is from a BoNT in Clostridium botulinum, serotype A, B, C, D, E, F, G, or H,
and wherein the light chain and the heavy chain are linked via a disulfide bond.

73. The complex of any one of claims 66-72, wherein (b)(ii) is from a BoNT in Clostridium botulinum, serotype A.

74. The complex of any one of claims 70-72, wherein the agent is fused to the N-terminus of the light chain.

75. The complex of any one of claims 66-74, wherein the agent is a nucleic acid, a peptide or protein, or a small molecule.

76. The complex of any one of claims 66-75, wherein the agent is a diagnostic agent.

77. The complex of any one of claims 66-75, wherein the agent is a therapeutic agent.

78. The complex of claim 77, wherein the therapeutic agent is an antibody.

79. The complex of claim 78, wherein the antibody is a VHH.

80. The complex of claim 78 or claim 79, wherein the antibody is an antibody against a BoNT light chain.

81. The complex of claim 80, wherein the antibody comprises the amino acid sequence of any one of SEQ ID NO: 57, SEQ ID NO: 58, SEQ ID NO: 67, SEQ ID NO: 113, and SEQ ID NO: 114.

82. The complex of claim 77, wherein the therapeutic agent is a fusion protein comprising two VHHs.

83. The complex of claim 82, wherein the fusion protein comprises a VHH against BoNT/A light chain fused to a VHH against BoNT/B light chain.

84. The complex of any one of claims 66-83, wherein the complex comprises an amino acid sequence that is at least 85%, at least 86%, at least 87%, at least 88%, at least 89%, at least 90%, at least 91%, at least 92%, at least 93%, at least 94%, at least 95%, at least 96%, at least 97%, at least 98%, at least 99%, or at least 99.5% identical to the amino acid sequence of any one of SEQ ID NOs: 65, 66, 71, 75, 76, 119, 128, 129, 133, 134, 137, 138, and 142-150.

85. The complex of claim 84, wherein the complex comprises an amino acid sequence of any one of SEQ ID NOs: 65, 66, 71, 75, 76, 119, 128, 129, 133, 134, 137, 138, and 142-150.

86. A composition comprising the complex of any one of claims 66-85.

87. The composition of claim 86, wherein the composition is a pharmaceutical composition.

88. The composition of claim 87, further comprising a pharmaceutically acceptable carrier.

89. Use of the complex of any one of claims 66-85 or the composition of any one of claims 86-88 for delivering the agent to a cell.

90. Use of the complex of any one of claims 66-85 or the composition of any one of claims 86-88 in treating or diagnosing a disease.

91. A method of delivering an agent to a cell, comprising contacting the cell with the complex of any one of claims 66-85 or the composition of any one of claims 86-88.

92. The method of claim 91, wherein the cell is in vitro.

93. The method of claim 91, wherein the cell is in vivo.

94. The method of claim 91, wherein the cell is ex vivo.

95. The method of any one of claims 91-94, wherein the cell is a neuron.

96. A method of diagnosing a disease, comprising administering to a subject in need thereof an effective amount of the complex of any one of 66-85 or the composition of any one of claims 86-88, wherein the agent is a diagnostic agent.

97. A method of treating a disease, comprising administering to a subject in need thereof an effective amount of the complex of any one of 66-85 or the composition of any one of claims 86-88, wherein the agent is a therapeutic agent.

98. The method of claim 97, wherein the disease is botulism.

99. The method of claim 98, wherein the subject has previously been administered a BoNT or been in contact with a BoNT.

100. The method of claim 99, wherein the therapeutic agent neutralizes the BoNT.

101. The method of any one of claims 96-100, wherein the complex is administered by injection.

102. The method of any one of claims 96-100, wherein the subject is human.

103. The method of any one of claims 96-100, wherein the subject is a rodent.

104. The method of claim 103, wherein the rodent is a mouse or a rat.

The application's sequence listing, which the Patent Office published only in electronic form, follows.

SEQUENCE LISTING (150 sequences)

SEQ ID NO: 1 - protein, 1306 aa, Clostridium botulinum
MKLEINKFNYNDPIDGINVITMRPPRHSDKINKGKGPFKAFQVIKNIWIVPERYNFTNNTNDLNIPSEPIMEADAIYNPNYLNTPSEKDEFLQGVIKVLERIKSKPEGEKLLELISSSIPLPLVSNGALTLSDNETIAYQENNNIVSNLQANLVIYGPGPDIANNATYGLYSTPISNGEGTLSEVSFSPFYLKPFDESYGNYRSLVNIVNKFVKREFAPDPASTLMHELVHVTHNLYGISNRNFYYNFDTGKIETSRQQNSLIFEELLTFGGIDSKAISSLIIKKIIETAKNNYTTLISERLNTVTVENDLLKYIKNKIPVQGRLGNFKLDTAEFEKKLNTILFVLNESNLAQRFSILVRKHYLKERPIDPIYVNILDDNSYSTLEGFNISSQGSNDFQGQLLESSYFEKIESNALRAFIKICPRNGLLYNAIYRNSKNYLNNIDLEDKKTTSKTNVSYPCSLLNGCIEVENKDLFLISNKDSLNDINLSEEKIKPETTVFFKDKLPPQDITLSNYDFTEANSIPSISQQNILERNEELYEPIRNSLFEIKTIYVDKLTTFHFLEAQNIDESIDSSKIRVELTDSVDEALSNPNKVYSPFKNMSNTINSIETGITSTYIFYQWLRSIVKDFSDETGKIDVIDKSSDTLAIVPYIGPLLNIGNDIRHGDFVGAIELAGITALLEYVPEFTIPILVGLEVIGGELAREQVEAIVNNALDKRDQKWAEVYNITKAQWWGTIHLQINTRLAHTYKALSRQANAIKMNMEFQLANYKGNIDDKAKIKNAISETEILLNKSVEQAMKNTEKFMIKLSNSYLTKEMIPKVQDNLKNFDLETKKTLDKFIKEKEDILGTNLSSSLRRKVSIRLNKNIAFDINDIPFSEFDDLINQYKNEIEDYEVLNLGAEDGKIKDLSGTTSDINIGSDIELADGRENKAIKIKGSENSTIKIAMNKYLRFSATDNFSISFWIKHPKPTNLLNNGIEYTLVENFNQRGWKISIQDSKLIWYLRDHNNSIKIVTPDYIAFNGWNLITITNNRSKGSIVYVNGSKIEEKDISSIWNTEVDDPIIFRLKNNRDTQAFTLLDQFSIYRKELNQNEVVKLYNYYFNSNYIRDIWGNPLQYNKKYYLQTQDKPGKGLIREYWSSFGYDYVILSDSKTITFPNNIRYGALYNGSKVLIKNSKKLDGLVRNKDFIQLEIDGYNMGISADRFNEDTNYIGTTYGTTHDLTTDFEIIQRQEKYRNYCQLKTPYNIFHKSGLMSTETSKPTFHDYRDWVYSSAWYFQNYENLNLRKHTKTNWYFIPKDEGWDED

SEQ ID NO: 2 - protein, 1279 aa, Enterococcus faecium
MVTINDLHYSDPIDEDNIINMRIPLYDLEVDDQFINHNVPDLKAFQVFPNVWVVPERYTFYSTMKNLDAPANPSRSSYYDPTYLQSDAEKEVFLQQMILLFKRINSTQEGQQFLNLLSRSIPVPYESNGDVAMGTTQVIKQMDDKGNVLKHRRAHIIIYGPGPDLMAKGSKALTKSRETGRGCMAEIYFSPMYHKTYSTKLTNKNSLVDKSVQEFVPDPAVTLIHELCHGLHALYGIDLGNVGSWEFNSNPNSLFSSWFSSKEAVNFEEVMTFGGEDVKVIKSEIDKKIPGILNLIKTTVEPIINKITDPHDEMLQCLQSKYPSLKGTLGQFFFDDTQLEKDIRDLWMVMNETMFAENLKALTRARYLVPKVENIVQVDILSPNVYTIDKGFNHLSKGFKGQSVSQSYFRKISALARGAVVRACPNPHFSSQRGLSSCIEILEDDLFIMSSKDSFTDTDFSEPSVGPVSYKAKKGADTILDSTLSNYDFSKEINFTSTVPIITVEDPLETDEDVPVISEDRTVYVDDYTTFHFLEAQKIGKEVVPTQTKVVFTTNMEEALFDSKKVYTVFENTASRINEAGTGIANGMMFYQWLKGIVQDFTEEATQKDTFDKISDVTMIVPYLGNILNIGNDIRKGDFMGAVELGGVTILLEAIPELTLPVLIGLTIIEDELEKEQVSQTVYNVLDKRDEKWEEVYGFVKQQWWWMVHTQFETRILHAYQALNHQVEAIKANMTYQLANYRGNQEDKELLEKAIDDTLQSLYYAVDQAMHNIKRFLIQSSKSYLLNQMLPKTKEQLLAFDQQTLRNVNDFINKNQGVLGESLAKDLKKKVEKRLTSLPVFNLEDLPISEFEDLIHSHEIDIQDSEVLNIGVNNGKIQDLSGENTPLTLGENLHIVNGRDNQAVRLNNQLDSKLEIQSRPNIHFTAFEDFSISIWIRCSMLRNNRNRGQKYTIIQQFNKYGWQLAIQDSVFVWTLHDTFNNQIQLTSGSALTNKNYLLQNFWLHITVTNKRSEKSRLYINGVLQDQKDISVLGNCHPKEPILFSIQDNSDPNYFVRFEQFNVYRKALTDSEVNRLYWKYFEGSYLRDVWGERLTYNRDYYMQLSTLPGRGIKREYRTWSGFDYIILSELGTQKIPTHEVTYPKLYQGQKITIHSDGKNLEPHVKSNKNIRLKIDDFYIGVVNPFKLPEWRPESGAYVVTTYNHAEDLCLYFRTRSSSQSLYYGQLIMNDGRNKSLLNYTLKGSTYWIWSSAWYYENYNTSSKTAGNWYFIPVDEGWKED

SEQ ID NO: 3 - protein, 924 aa, Paraclostridium bifermentans
MKLEINKFNYNDPIDGINVITMRPPRHSDKINKGKGPFKAFQVIKNIWIVPERYNFTNNTNDLNIPSEPIMEADAIYNPNYLNTPSEKDEFLQGVIKVLERIKSKPEGEKLLELISSSIPLPLVSNGALTLSDNETIAYQENNNIVSNLQANLVIYGPGPDIANNATYGLYSTPISNGEGTLSEVSFSPFYLKPFDESYGNYRSLVNIVNKFVKREFAPDPASTLMHQLVHVTHNLYGISNRNFYYNFDTGKIETSRQQNSLIFEELLTFGGIDSKAISSLIIKKIIETAKNNYTTLISERLNTVTVENDLLKYIKNKIPVQGRLGNFKLDTAEFEKKLNTILFVLNESNLAQRFSILVAKHFLKERPIDPIYVNILDDNSYSTLEGFNISSQGSNDFQGQLLESSYFEKIESNALRAFIKICPRNGLLYNAIYRNSKNYLNNIDLEDKKTTSKTNVSYPCSLLNGCIEVENKDLFLISNKDSLNDINLSEEKIKPETTVFFKDKLPPQDITLSNYDFTEANSIPSISQQNILERNEELYEPIRNSLFEIKTIYVDKLTTFHFLEAQNIDESIDSSKIRVELTDSVDEALSNPNKVYSPFKNMSNTINSIETGITSTYIFYQWLRSIVKDFSDETGKIDVIDKSSDTLAIVPYIGPLLNIGNDIRHGDFVGAIELAGITALLEYVPEFTIPILVGLEVIGGELAREQVEAIVNNALDKRDQKWAEVYNITKAQWWGTIHLQINTRLAHTYKALSRQANAIKMNMEFQLANYKGNIDDKAKIKNAISETEILLNKSVEQAMKNTEKFMIKLSNSYLTKEMIPKVQDNLKNFDLETKKTLDKFIKEKEDILGTNLSSSLRRKVSIRLNKNIAFDINDIPFSEFDDLINQYKNEIEDYEVLNLGAEDGKIKDLSGTTSDINIGSDIE

SEQ ID NO: 4 - protein, 894 aa, Artificial Sequence
  Synthetic
MVTINDLHYSDPIDEDNIINMRIPLYDLEVDDQFINHNVPDLKAFQVFPNVWVVPERYTFYSTMKNLDAPANPSRSSYYDPTYLQSDAEKEVFLQQMILLFKRINSTQEGQQFLNLLSRSIPVPYESNGDVAMGTTQVIKQMDDKGNVLKHRRAHIIIYGPGPDLMAKGSKALTKSRETGRGCMAEIYFSPMYHKTYSTKLTNKNSLVDKSVQEFVPDPAVTLIHQLCHGLHALYGIDLGNVGSWEFNSNPNSLFSSWFSSKEAVNFEEVMTFGGEDVKVIKSEIDKKIPGILNLIKTTVEPIINKITDPHDEMLQCLQSKYPSLKGTLGQFFFDDTQLEKDIRDLWMVMNETMFAENLKALTAARFLVPKVENIVQVDILSPNVYTIDKGFNHLSKGFKGQSVSQSYFRKISALARGAVVRACPNPHFSSQRGLSSCIEILEDDLFIMSSKDSFTDTDFSEPSVGPVSYKAKKGADTILDSTLSNYDFSKEINFTSTVPIITVEDPLETDEDVPVISEDRTVYVDDYTTFHFLEAQKIGKEVVPTQTKVVFTTNMEEALFDSKKVYTVFENTASRINEAGTGIANGMMFYQWLKGIVQDFTEEATQKDTFDKISDVTMIVPYLGNILNIGNDIRKGDFMGAVELGGVTILLEAIPELTLPVLIGLTIIEDELEKEQVSQTVYNVLDKRDEKWEEVYGFVKQQWWWMVHTQFETRILHAYQALNHQVEAIKANMTYQLANYRGNQEDKELLEKAIDDTLQSLYYAVDQAMHNIKRFLIQSSKSYLLNQMLPKTKEQLLAFDQQTLRNVNDFINKNQGVLGESLAKDLKKKVEKRLTSLPVFNLEDLPISEFEDLIHSHEIDIQDSEVLNIGVNNGKIQDLSGENTPLTLGENLH

SEQ ID NO: 5 - protein, 1349 aa, Artificial Sequence
  Synthetic
MKLEINKFNYNDPIDGINVITMRPPRHSDKINKGKGPFKAFQVIKNIWIVPERYNFTNNTNDLNIPSEPIMEADAIYNPNYLNTPSEKDEFLQGVIKVLERIKSKPEGEKLLELISSSIPLPLVSNGALTLSDNETIAYQENNNIVSNLQANLVIYGPGPDIANNATYGLYSTPISNGEGTLSEVSFSPFYLKPFDESYGNYRSLVNIVNKFVKREFAPDPASTLMHQLVHVTHNLYGISNRNFYYNFDTGKIETSRQQNSLIFEELLTFGGIDSKAISSLIIKKIIETAKNNYTTLISERLNTVTVENDLLKYIKNKIPVQGRLGNFKLDTAEFEKKLNTILFVLNESNLAQRFSILVAKHFLKERPIDPIYVNILDDNSYSTLEGFNISSQGSNDFQGQLLESSYFEKIESNALRAFIKICPRNGLLYNAIYRNSKNYLNNIDLEDKKTTSKTNVSYPCSLLNGCIEVENKDLFLISNKDSLNDINLSEEKIKPETTVFFKDKLPPQDITLSNYDFTEANSIPSISQQNILERNEELYEPIRNSLFEIKTIYVDKLTTFHFLEAQNIDESIDSSKIRVELTDSVDEALSNPNKVYSPFKNMSNTINSIETGITSTYIFYQWLRSIVKDFSDETGKIDVIDKSSDTLAIVPYIGPLLNIGNDIRHGDFVGAIELAGITALLEYVPEFTIPILVGLEVIGGELAREQVEAIVNNALDKRDQKWAEVYNITKAQWWGTIHLQINTRLAHTYKALSRQANAIKMNMEFQLANYKGNIDDKAKIKNAISETEILLNKSVEQAMKNTEKFMIKLSNSYLTKEMIPKVQDNLKNFDLETKKTLDKFIKEKEDILGTNLSSSLRRKVSIRLNKNIAFDINDIPFSEFDDLINQYKNEIEDYEVLNLGAEDGKIKDLSGTTSDINIGSDIEIINTSILNLRYESNHLIDLSRYASKINIGSKVNFDPIDKNQIQLFNLESSKIEVILKNAIVYNSMYENFSTSFWIRIPKYFNSISLNNEYTIINCMENNSGWKVSLNYGEIIWTLQDTQEIKQRVVFKYSQMINISDYINRWIFVTITNNRLNNSKIYINGRLIDQKPISNLGNIHASNNIMFKLDGCRDTHRYIWIKYFNLFDKELNEKEIKDLYDNQSNSGILKDFWGDYLQYDKPYYMLNLYDPNKYVDVNNVGIRGYMYLKGPRGSVMTTNIYLNSSLYRGTKFIIKKYASGNKDNIVRNNDRVYINVVVKNKEYRLATNASQAGVEKILSALEIPDVGNLSQVVVMKSKNDQGITNKCKMNLQDNNGNDIGFIGFHQFNNIAKLVASNWYNRQIERSSRTLGCSWEFIPVDDGWGERPLQ

SEQ ID NO: 6 - protein, 1356 aa, Artificial Sequence
  Synthetic
MKLEINKFNYNDPIDGINVITMRPPRHSDKINKGKGPFKAFQVIKNIWIVPERYNFTNNTNDLNIPSEPIMEADAIYNPNYLNTPSEKDEFLQGVIKVLERIKSKPEGEKLLELISSSIPLPLVSNGALTLSDNETIAYQENNNIVSNLQANLVIYGPGPDIANNATYGLYSTPISNGEGTLSEVSFSPFYLKPFDESYGNYRSLVNIVNKFVKREFAPDPASTLMHQLVHVTHNLYGISNRNFYYNFDTGKIETSRQQNSLIFEELLTFGGIDSKAISSLIIKKIIETAKNNYTTLISERLNTVTVENDLLKYIKNKIPVQGRLGNFKLDTAEFEKKLNTILFVLNESNLAQRFSILVAKHFLKERPIDPIYVNILDDNSYSTLEGFNISSQGSNDFQGQLLESSYFEKIESNALRAFIKICPRNGLLYNAIYRNSKNYLNNIDLEDKKTTSKTNVSYPCSLLNGCIEVENKDLFLISNKDSLNDINLSEEKIKPETTVFFKDKLPPQDITLSNYDFTEANSIPSISQQNILERNEELYEPIRNSLFEIKTIYVDKLTTFHFLEAQNIDESIDSSKIRVELTDSVDEALSNPNKVYSPFKNMSNTINSIETGITSTYIFYQWLRSIVKDFSDETGKIDVIDKSSDTLAIVPYIGPLLNIGNDIRHGDFVGAIELAGITALLEYVPEFTIPILVGLEVIGGELAREQVEAIVNNALDKRDQKWAEVYNITKAQWWGTIHLQINTRLAHTYKALSRQANAIKMNMEFQLANYKGNIDDKAKIKNAISETEILLNKSVEQAMKNTEKFMIKLSNSYLTKEMIPKVQDNLKNFDLETKKTLDKFIKEKEDILGTNLSSSLRRKVSIRLNKNIAFDINDIPFSEFDDLINQYKNEIEDYEVLNLGAEDGKIKDLSGTTSDINIGSDIEILNNIILNLRYKDNNLIDLSGYGAKVEVYDGVELNDKNQFKLTSSANSKIRVTQNQNIIFNSVFLDFSVSFWIRIPKYKNDGIQNYIHNEYTIINCMKNNSGWKISIRGNRIIWTLIDINGKTKSVFFEYNIREDISEYINRWFFVTITNNLNNAKIYINGKLESNTDIKDIREVIANGEIIFKLDGDIDRTQFIWMKYFSIFNTELSQSNIEERYKIQSYSEYLKDFWGNPLMYNKEYYMFNAGNKNSYIKLKKDSPVGEILTRSKYNQNSKYINYRDLYIGEKFIIRRKSNSQSINDDIVRKEDYIYLDFFNLNQEWRVYTYKYFKKEEEKLFLAPISDSDEFYNTIQIKEYDEQPTYSCQLLFKKDEESTDEIGLIGIHRFYESGIVFEEYKDYFCISKWYLKEVKRKPYNLKLGCNWQFIPKDEGWTE

SEQ ID NO: 7 - protein, 1348 aa, Artificial Sequence
  Synthetic
MKLEINKFNYNDPIDGINVITMRPPRHSDKINKGKGPFKAFQVIKNIWIVPERYNFTNNTNDLNIPSEPIMEADAIYNPNYLNTPSEKDEFLQGVIKVLERIKSKPEGEKLLELISSSIPLPLVSNGALTLSDNETIAYQENNNIVSNLQANLVIYGPGPDIANNATYGLYSTPISNGEGTLSEVSFSPFYLKPFDESYGNYRSLVNIVNKFVKREFAPDPASTLMHQLVHVTHNLYGISNRNFYYNFDTGKIETSRQQNSLIFEELLTFGGIDSKAISSLIIKKIIETAKNNYTTLISERLNTVTVENDLLKYIKNKIPVQGRLGNFKLDTAEFEKKLNTILFVLNESNLAQRFSILVAKHFLKERPIDPIYVNILDDNSYSTLEGFNISSQGSNDFQGQLLESSYFEKIESNALRAFIKICPRNGLLYNAIYRNSKNYLNNIDLEDKKTTSKTNVSYPCSLLNGCIEVENKDLFLISNKDSLNDINLSEEKIKPETTVFFKDKLPPQDITLSNYDFTEANSIPSISQQNILERNEELYEPIRNSLFEIKTIYVDKLTTFHFLEAQNIDESIDSSKIRVELTDSVDEALSNPNKVYSPFKNMSNTINSIETGITSTYIFYQWLRSIVKDFSDETGKIDVIDKSSDTLAIVPYIGPLLNIGNDIRHGDFVGAIELAGITALLEYVPEFTIPILVGLEVIGGELAREQVEAIVNNALDKRDQKWAEVYNITKAQWWGTIHLQINTRLAHTYKALSRQANAIKMNMEFQLANYKGNIDDKAKIKNAISETEILLNKSVEQAMKNTEKFMIKLSNSYLTKEMIPKVQDNLKNFDLETKKTLDKFIKEKEDILGTNLSSSLRRKVSIRLNKNIAFDINDIPFSEFDDLINQYKNEIEDYEVLNLGAEDGKIKDLSGTTSDINIGSDIEINDSKILSLQNRKNTLVDTSGYNAEVSEEGDVQLNPIFPFDFKLGSSGEDRGKVIVTQNENIVYNSMYESFSISFWIRINKWVSNLPGYTIIDSVKNNSGWSIGIISNFLVFTLKQNEDSEQSINFSYDISNNAPGYNKWFFVTVTNNMMGNMKIYINGKLIDTIKVKELTGINFSKTITFEINKIPDTGLITSDSDNINMWIRDFYIFAKELDGKDINILFNSLQYTNVVKDYWGNDLRYNKEYYMVNIDYLNRYMYANSRQIVFNTRRNNNDFNEGYKIIIKRIRGNTNDTRVRGGDILYFDMTINNKAYNLFMKNETMYADNHSTEDIYAIGLREQTKDINDNIIFQIQPMNNTYYYASQIFKSNFNGENISGICSIGTYRFRLGGDWYRHNYLVPTVKQGNYASLLESTSTHWGFVPVSE

SEQ ID NO: 8 - protein, 1337 aa, Artificial Sequence
  Synthetic
MKLEINKFNYNDPIDGINVITMRPPRHSDKINKGKGPFKAFQVIKNIWIVPERYNFTNNTNDLNIPSEPIMEADAIYNPNYLNTPSEKDEFLQGVIKVLERIKSKPEGEKLLELISSSIPLPLVSNGALTLSDNETIAYQENNNIVSNLQANLVIYGPGPDIANNATYGLYSTPISNGEGTLSEVSFSPFYLKPFDESYGNYRSLVNIVNKFVKREFAPDPASTLMHQLVHVTHNLYGISNRNFYYNFDTGKIETSRQQNSLIFEELLTFGGIDSKAISSLIIKKIIETAKNNYTTLISERLNTVTVENDLLKYIKNKIPVQGRLGNFKLDTAEFEKKLNTILFVLNESNLAQRFSILVAKHFLKERPIDPIYVNILDDNSYSTLEGFNISSQGSNDFQGQLLESSYFEKIESNALRAFIKICPRNGLLYNAIYRNSKNYLNNIDLEDKKTTSKTNVSYPCSLLNGCIEVENKDLFLISNKDSLNDINLSEEKIKPETTVFFKDKLPPQDITLSNYDFTEANSIPSISQQNILERNEELYEPIRNSLFEIKTIYVDKLTTFHFLEAQNIDESIDSSKIRVELTDSVDEALSNPNKVYSPFKNMSNTINSIETGITSTYIFYQWLRSIVKDFSDETGKIDVIDKSSDTLAIVPYIGPLLNIGNDIRHGDFVGAIELAGITALLEYVPEFTIPILVGLEVIGGELAREQVEAIVNNALDKRDQKWAEVYNITKAQWWGTIHLQINTRLAHTYKALSRQANAIKMNMEFQLANYKGNIDDKAKIKNAISETEILLNKSVEQAMKNTEKFMIKLSNSYLTKEMIPKVQDNLKNFDLETKKTLDKFIKEKEDILGTNLSSSLRRKVSIRLNKNIAFDINDIPFSEFDDLINQYKNEIEDYEVLNLGAEDGKIKDLSGTTSDINIGSDIEINDSKILSLQNKKNALVDTSGYNAEVRVGDNVQLNTIYTNDFKLSSSGDKIIVNLNNNILYSAIYENSSVSFWIKISKDLTNSHNEYTIINSIEQNSGWKLCIRNGNIEWILQDVNRKYKSLIFDYSESLSHTGYTNKWFFVTITNNIMGYMKLYINGELKQSQKIEDLDEVKLDKTIVFGIDENIDENQMLWIRDFNIFSKELSNEDINIVYEGQILRNVIKDYWGNPLKFDTEYYIINDNYIDRYIAPESNVLVLVQYPDRSKLYTGNPITIKSVSDKNPYSRILNGDNIILHMLYNSRKYMIIRDTDTIYATQGGECSQNCVYALKLQSNLGNYGIGIFSIKNIVSKNKYCSQIFSSFRENTMLLADIYKPWRFSFKNAYTPVAVTNYETKLLSTSSFWKFISRDPGWVE

SEQ ID NO: 9 - protein, 1330 aa, Artificial Sequence
  Synthetic
MKLEINKFNYNDPIDGINVITMRPPRHSDKINKGKGPFKAFQVIKNIWIVPERYNFTNNTNDLNIPSEPIMEADAIYNPNYLNTPSEKDEFLQGVIKVLERIKSKPEGEKLLELISSSIPLPLVSNGALTLSDNETIAYQENNNIVSNLQANLVIYGPGPDIANNATYGLYSTPISNGEGTLSEVSFSPFYLKPFDESYGNYRSLVNIVNKFVKREFAPDPASTLMHQLVHVTHNLYGISNRNFYYNFDTGKIETSRQQNSLIFEELLTFGGIDSKAISSLIIKKIIETAKNNYTTLISERLNTVTVENDLLKYIKNKIPVQGRLGNFKLDTAEFEKKLNTILFVLNESNLAQRFSILVAKHFLKERPIDPIYVNILDDNSYSTLEGFNISSQGSNDFQGQLLESSYFEKIESNALRAFIKICPRNGLLYNAIYRNSKNYLNNIDLEDKKTTSKTNVSYPCSLLNGCIEVENKDLFLISNKDSLNDINLSEEKIKPETTVFFKDKLPPQDITLSNYDFTEANSIPSISQQNILERNEELYEPIRNSLFEIKTIYVDKLTTFHFLEAQNIDESIDSSKIRVELTDSVDEALSNPNKVYSPFKNMSNTINSIETGITSTYIFYQWLRSIVKDFSDETGKIDVIDKSSDTLAIVPYIGPLLNIGNDIRHGDFVGAIELAGITALLEYVPEFTIPILVGLEVIGGELAREQVEAIVNNALDKRDQKWAEVYNITKAQWWGTIHLQINTRLAHTYKALSRQANAIKMNMEFQLANYKGNIDDKAKIKNAISETEILLNKSVEQAMKNTEKFMIKLSNSYLTKEMIPKVQDNLKNFDLETKKTLDKFIKEKEDILGTNLSSSLRRKVSIRLNKNIAFDINDIPFSEFDDLINQYKNEIEDYEVLNLGAEDGKIKDLSGTTSDINIGSDIEIKSSSVLNMRYKNDKYVDTSGYDSNININGDVYKYPTNKNQFGIYNDKLSEVNISQNDYIIYDNKYKNFSISFWVRIPNYDNKIVNVNNEYTIINCMRDNNSGWKVSLNHNEIIWTLQDNAGINQKLAFNYGNANGISDYINKWIFVTITNDRLGDSKLYINGNLIDQKSILNLGNIHVSDNILFKIVNCSYTRYIGIRYFNIFDKELDETEIQTLYSNEPNTNILKDFWGNYLLYDKEYYLLNVLKPNNFIDRRKDSTLSINNIRSTILLANRLYSGIKVKIQRVNNSSTNDNLVRKNDQVYINFVASKTHLFPLYADTATTNKEKTIKISSSGNRFNQVVVMNSVGNNCTMNFKNNNGNNIGLLGFKADTVVASTWYYTHMRDHTNSNGCFWNFISEEHGWQEK

SEQ ID NO: 10 - protein, 1337 aa, Artificial Sequence
  Synthetic
MKLEINKFNYNDPIDGINVITMRPPRHSDKINKGKGPFKAFQVIKNIWIVPERYNFTNNTNDLNIPSEPIMEADAIYNPNYLNTPSEKDEFLQGVIKVLERIKSKPEGEKLLELISSSIPLPLVSNGALTLSDNETIAYQENNNIVSNLQANLVIYGPGPDIANNATYGLYSTPISNGEGTLSEVSFSPFYLKPFDESYGNYRSLVNIVNKFVKREFAPDPASTLMHQLVHVTHNLYGISNRNFYYNFDTGKIETSRQQNSLIFEELLTFGGIDSKAISSLIIKKIIETAKNNYTTLISERLNTVTVENDLLKYIKNKIPVQGRLGNFKLDTAEFEKKLNTILFVLNESNLAQRFSILVAKHFLKERPIDPIYVNILDDNSYSTLEGFNISSQGSNDFQGQLLESSYFEKIESNALRAFIKICPRNGLLYNAIYRNSKNYLNNIDLEDKKTTSKTNVSYPCSLLNGCIEVENKDLFLISNKDSLNDINLSEEKIKPETTVFFKDKLPPQDITLSNYDFTEANSIPSISQQNILERNEELYEPIRNSLFEIKTIYVDKLTTFHFLEAQNIDESIDSSKIRVELTDSVDEALSNPNKVYSPFKNMSNTINSIETGITSTYIFYQWLRSIVKDFSDETGKIDVIDKSSDTLAIVPYIGPLLNIGNDIRHGDFVGAIELAGITALLEYVPEFTIPILVGLEVIGGELAREQVEAIVNNALDKRDQKWAEVYNITKAQWWGTIHLQINTRLAHTYKALSRQANAIKMNMEFQLANYKGNIDDKAKIKNAISETEILLNKSVEQAMKNTEKFMIKLSNSYLTKEMIPKVQDNLKNFDLETKKTLDKFIKEKEDILGTNLSSSLRRKVSIRLNKNIAFDINDIPFSEFDDLINQYKNEIEDYEVLNLGAEDGKIKDLSGTTSDINIGSDIEIKDNSILDMRYENNKFIDISGYGSNISINGDVYIYSTNRNQFGIYSSKPSEVNIAQNNDIIYNGRYQNFSISFWVRIPKYFNKVNLNNEYTIIDCIRNNNSGWKISLNYNKIIWTLQDTAGNNQKLVFNYTQMISISDYINKWIFVTITNNRLGNSRIYINGNLIDEKSISNLGDIHVSDNILFKIVGCNDTRYVGIRYFKVFDTELGKTEIETLYSDEPDPSILKDFWGNYLLYNKRYYLLNLLRTDKSITQNSNFLNINQQRGVYQKPNIFSNTRLYTGVEVIIRKNGSTDISNTDNFVRKNDLAYINVVDRDVEYRLYADISIAKPEKIIKLIRTSNSNNSLGQIIVMDSIGNNCTMNFQNNNGGNIGLLGFHSNNLVASSWYYNNIRKNTSSNGCFWSFISKEHGWQEN

SEQ ID NO: 11 - protein, 1357 aa, Artificial Sequence
  Synthetic
MKLEINKFNYNDPIDGINVITMRPPRHSDKINKGKGPFKAFQVIKNIWIVPERYNFTNNTNDLNIPSEPIMEADAIYNPNYLNTPSEKDEFLQGVIKVLERIKSKPEGEKLLELISSSIPLPLVSNGALTLSDNETIAYQENNNIVSNLQANLVIYGPGPDIANNATYGLYSTPISNGEGTLSEVSFSPFYLKPFDESYGNYRSLVNIVNKFVKREFAPDPASTLMHQLVHVTHNLYGISNRNFYYNFDTGKIETSRQQNSLIFEELLTFGGIDSKAISSLIIKKIIETAKNNYTTLISERLNTVTVENDLLKYIKNKIPVQGRLGNFKLDTAEFEKKLNTILFVLNESNLAQRFSILVAKHFLKERPIDPIYVNILDDNSYSTLEGFNISSQGSNDFQGQLLESSYFEKIESNALRAFIKICPRNGLLYNAIYRNSKNYLNNIDLEDKKTTSKTNVSYPCSLLNGCIEVENKDLFLISNKDSLNDINLSEEKIKPETTVFFKDKLPPQDITLSNYDFTEANSIPSISQQNILERNEELYEPIRNSLFEIKTIYVDKLTTFHFLEAQNIDESIDSSKIRVELTDSVDEALSNPNKVYSPFKNMSNTINSIETGITSTYIFYQWLRSIVKDFSDETGKIDVIDKSSDTLAIVPYIGPLLNIGNDIRHGDFVGAIELAGITALLEYVPEFTIPILVGLEVIGGELAREQVEAIVNNALDKRDQKWAEVYNITKAQWWGTIHLQINTRLAHTYKALSRQANAIKMNMEFQLANYKGNIDDKAKIKNAISETEILLNKSVEQAMKNTEKFMIKLSNSYLTKEMIPKVQDNLKNFDLETKKTLDKFIKEKEDILGTNLSSSLRRKVSIRLNKNIAFDINDIPFSEFDDLINQYKNEIEDYEVLNLGAEDGKIKDLSGTTSDINIGSDIEISSNAILSLSYRGGRLIDSSGYGATMNVGSDVIFNDIGNGQFKLNNSENSNITAHQSKFVVYDSMFDNFSINFWVRTPKYNNNDIQTYLQNEYTIISCIKNDSGWKVSIKGNRIIWTLIDVNAKSKSIFFEYSIKDNISDYINKWFSITITNDRLGNANIYINGSLKKSEKILNLDRINSSNDIDFKLINCTDTTKFVWIKDFNIFGRELNATEVSSLYWIQSSTNTLKDFWGNPLRYDTQYYLFNQGMQNIYIKYFSKASMGETAPRTNFNNAAINYQNLYLGLRFIIKKASNSRNINNDNIVREGDYIYLNIDNISDESYRVYVLVNSKEIQTQLFLAPINDDPTFYDVLQIKKYYEKTTYNCQILCEKDTKTFGLFGIGKFVKDYGYVWDTYDNYFCISQWYLRRISENINKLRLGCNWQFIPVDEGWTE

SEQ ID NO: 12 - protein, 1352 aa, Artificial Sequence
  Synthetic
MKLEINKFNYNDPIDGINVITMRPPRHSDKINKGKGPFKAFQVIKNIWIVPERYNFTNNTNDLNIPSEPIMEADAIYNPNYLNTPSEKDEFLQGVIKVLERIKSKPEGEKLLELISSSIPLPLVSNGALTLSDNETIAYQENNNIVSNLQANLVIYGPGPDIANNATYGLYSTPISNGEGTLSEVSFSPFYLKPFDESYGNYRSLVNIVNKFVKREFAPDPASTLMHQLVHVTHNLYGISNRNFYYNFDTGKIETSRQQNSLIFEELLTFGGIDSKAISSLIIKKIIETAKNNYTTLISERLNTVTVENDLLKYIKNKIPVQGRLGNFKLDTAEFEKKLNTILFVLNESNLAQRFSILVAKHFLKERPIDPIYVNILDDNSYSTLEGFNISSQGSNDFQGQLLESSYFEKIESNALRAFIKICPRNGLLYNAIYRNSKNYLNNIDLEDKKTTSKTNVSYPCSLLNGCIEVENKDLFLISNKDSLNDINLSEEKIKPETTVFFKDKLPPQDITLSNYDFTEANSIPSISQQNILERNEELYEPIRNSLFEIKTIYVDKLTTFHFLEAQNIDESIDSSKIRVELTDSVDEALSNPNKVYSPFKNMSNTINSIETGITSTYIFYQWLRSIVKDFSDETGKIDVIDKSSDTLAIVPYIGPLLNIGNDIRHGDFVGAIELAGITALLEYVPEFTIPILVGLEVIGGELAREQVEAIVNNALDKRDQKWAEVYNITKAQWWGTIHLQINTRLAHTYKALSRQANAIKMNMEFQLANYKGNIDDKAKIKNAISETEILLNKSVEQAMKNTEKFMIKLSNSYLTKEMIPKVQDNLKNFDLETKKTLDKFIKEKEDILGTNLSSSLRRKVSIRLNKNIAFDINDIPFSEFDDLINQYKNEIEDYEVLNLGAEDGKIKDLSGTTSDINIGSDIELKYNCILNIKYEMDRDKLVDSSGYRSRINIGTGVKFSEIDKNQVQLSNLESSKIEVILNNGVIYNSMYENFSTSFWIRIPKYFRNINNEYKIISCMQNNSGWEVSLNFSNMNSKIIWTLQDTEGIKKTVVFQYTQNINISDYINRWIFVTITNNRLSNSKIYINGRLINEESISDLGNIHASNNIMFKLDGCRDPHRYIWIKYFNLFDKELNKKEIKDLYDNQSNSGILKDFWGDYLQYDKPYYMLNLYDPNKYLDVNNVGIRGYMYLKGPRGRIVTTNIYLNSTLYMGTKFIIKKYASGNKDNIVRNNDRVYINVVVKNKEYRLATNASQAGVEKILSAVEIPDVGNLSQVVVMKSENDQGIRNKCKMNLQDNNGNDIGFIGFHQFNNIAKLVASNWYNRQIGKASRTFGCSWEFIPVDDGWGESSL

SEQ ID NO: 13 - protein, 1319 aa, Artificial Sequence
  Synthetic
MVTINDLHYSDPIDEDNIINMRIPLYDLEVDDQFINHNVPDLKAFQVFPNVWVVPERYTFYSTMKNLDAPANPSRSSYYDPTYLQSDAEKEVFLQQMILLFKRINSTQEGQQFLNLLSRSIPVPYESNGDVAMGTTQVIKQMDDKGNVLKHRRAHIIIYGPGPDLMAKGSKALTKSRETGRGCMAEIYFSPMYHKTYSTKLTNKNSLVDKSVQEFVPDPAVTLIHQLCHGLHALYGIDLGNVGSWEFNSNPNSLFSSWFSSKEAVNFEEVMTFGGEDVKVIKSEIDKKIPGILNLIKTTVEPIINKITDPHDEMLQCLQSKYPSLKGTLGQFFFDDTQLEKDIRDLWMVMNETMFAENLKALTAARFLVPKVENIVQVDILSPNVYTIDKGFNHLSKGFKGQSVSQSYFRKISALARGAVVRACPNPHFSSQRGLSSCIEILEDDLFIMSSKDSFTDTDFSEPSVGPVSYKAKKGADTILDSTLSNYDFSKEINFTSTVPIITVEDPLETDEDVPVISEDRTVYVDDYTTFHFLEAQKIGKEVVPTQTKVVFTTNMEEALFDSKKVYTVFENTASRINEAGTGIANGMMFYQWLKGIVQDFTEEATQKDTFDKISDVTMIVPYLGNILNIGNDIRKGDFMGAVELGGVTILLEAIPELTLPVLIGLTIIEDELEKEQVSQTVYNVLDKRDEKWEEVYGFVKQQWWWMVHTQFETRILHAYQALNHQVEAIKANMTYQLANYRGNQEDKELLEKAIDDTLQSLYYAVDQAMHNIKRFLIQSSKSYLLNQMLPKTKEQLLAFDQQTLRNVNDFINKNQGVLGESLAKDLKKKVEKRLTSLPVFNLEDLPISEFEDLIHSHEIDIQDSEVLNIGVNNGKIQDLSGENTPLTLGENLHIINTSILNLRYESNHLIDLSRYASKINIGSKVNFDPIDKNQIQLFNLESSKIEVILKNAIVYNSMYENFSTSFWIRIPKYFNSISLNNEYTIINCMENNSGWKVSLNYGEIIWTLQDTQEIKQRVVFKYSQMINISDYINRWIFVTITNNRLNNSKIYINGRLIDQKPISNLGNIHASNNIMFKLDGCRDTHRYIWIKYFNLFDKELNEKEIKDLYDNQSNSGILKDFWGDYLQYDKPYYMLNLYDPNKYVDVNNVGIRGYMYLKGPRGSVMTTNIYLNSSLYRGTKFIIKKYASGNKDNIVRNNDRVYINVVVKNKEYRLATNASQAGVEKILSALEIPDVGNLSQVVVMKSKNDQGITNKCKMNLQDNNGNDIGFIGFHQFNNIAKLVASNWYNRQIERSSRTLGCSWEFIPVDDGWGERPLQ

SEQ ID NO: 14 - protein, 1326 aa, Artificial Sequence
  Synthetic
MVTINDLHYSDPIDEDNIINMRIPLYDLEVDDQFINHNVPDLKAFQVFPNVWVVPERYTFYSTMKNLDAPANPSRSSYYDPTYLQSDAEKEVFLQQMILLFKRINSTQEGQQFLNLLSRSIPVPYESNGDVAMGTTQVIKQMDDKGNVLKHRRAHIIIYGPGPDLMAKGSKALTKSRETGRGCMAEIYFSPMYHKTYSTKLTNKNSLVDKSVQEFVPDPAVTLIHQLCHGLHALYGIDLGNVGSWEFNSNPNSLFSSWFSSKEAVNFEEVMTFGGEDVKVIKSEIDKKIPGILNLIKTTVEPIINKITDPHDEMLQCLQSKYPSLKGTLGQFFFDDTQLEKDIRDLWMVMNETMFAENLKALTAARFLVPKVENIVQVDILSPNVYTIDKGFNHLSKGFKGQSVSQSYFRKISALARGAVVRACPNPHFSSQRGLSSCIEILEDDLFIMSSKDSFTDTDFSEPSVGPVSYKAKKGADTILDSTLSNYDFSKEINFTSTVPIITVEDPLETDEDVPVISEDRTVYVDDYTTFHFLEAQKIGKEVVPTQTKVVFTTNMEEALFDSKKVYTVFENTASRINEAGTGIANGMMFYQWLKGIVQDFTEEATQKDTFDKISDVTMIVPYLGNILNIGNDIRKGDFMGAVELGGVTILLEAIPELTLPVLIGLTIIEDELEKEQVSQTVYNVLDKRDEKWEEVYGFVKQQWWWMVHTQFETRILHAYQALNHQVEAIKANMTYQLANYRGNQEDKELLEKAIDDTLQSLYYAVDQAMHNIKRFLIQSSKSYLLNQMLPKTKEQLLAFDQQTLRNVNDFINKNQGVLGESLAKDLKKKVEKRLTSLPVFNLEDLPISEFEDLIHSHEIDIQDSEVLNIGVNNGKIQDLSGENTPLTLGENLHILNNIILNLRYKDNNLIDLSGYGAKVEVYDGVELNDKNQFKLTSSANSKIRVTQNQNIIFNSVFLDFSVSFWIRIPKYKNDGIQNYIHNEYTIINCMKNNSGWKISIRGNRIIWTLIDINGKTKSVFFEYNIREDISEYINRWFFVTITNNLNNAKIYINGKLESNTDIKDIREVIANGEIIFKLDGDIDRTQFIWMKYFSIFNTELSQSNIEERYKIQSYSEYLKDFWGNPLMYNKEYYMFNAGNKNSYIKLKKDSPVGEILTRSKYNQNSKYINYRDLYIGEKFIIRRKSNSQSINDDIVRKEDYIYLDFFNLNQEWRVYTYKYFKKEEEKLFLAPISDSDEFYNTIQIKEYDEQPTYSCQLLFKKDEESTDEIGLIGIHRFYESGIVFEEYKDYFCISKWYLKEVKRKPYNLKLGCNWQFIPKDEGWTE

SEQ ID NO: 15 - protein, 1318 aa, Artificial Sequence
  Synthetic
MVTINDLHYSDPIDEDNIINMRIPLYDLEVDDQFINHNVPDLKAFQVFPNVWVVPERYTFYSTMKNLDAPANPSRSSYYDPTYLQSDAEKEVFLQQMILLFKRINSTQEGQQFLNLLSRSIPVPYESNGDVAMGTTQVIKQMDDKGNVLKHRRAHIIIYGPGPDLMAKGSKALTKSRETGRGCMAEIYFSPMYHKTYSTKLTNKNSLVDKSVQEFVPDPAVTLIHQLCHGLHALYGIDLGNVGSWEFNSNPNSLFSSWFSSKEAVNFEEVMTFGGEDVKVIKSEIDKKIPGILNLIKTTVEPIINKITDPHDEMLQCLQSKYPSLKGTLGQFFFDDTQLEKDIRDLWMVMNETMFAENLKALTAARFLVPKVENIVQVDILSPNVYTIDKGFNHLSKGFKGQSVSQSYFRKISALARGAVVRACPNPHFSSQRGLSSCIEILEDDLFIMSSKDSFTDTDFSEPSVGPVSYKAKKGADTILDSTLSNYDFSKEINFTSTVPIITVEDPLETDEDVPVISEDRTVYVDDYTTFHFLEAQKIGKEVVPTQTKVVFTTNMEEALFDSKKVYTVFENTASRINEAGTGIANGMMFYQWLKGIVQDFTEEATQKDTFDKISDVTMIVPYLGNILNIGNDIRKGDFMGAVELGGVTILLEAIPELTLPVLIGLTIIEDELEKEQVSQTVYNVLDKRDEKWEEVYGFVKQQWWWMVHTQFETRILHAYQALNHQVEAIKANMTYQLANYRGNQEDKELLEKAIDDTLQSLYYAVDQAMHNIKRFLIQSSKSYLLNQMLPKTKEQLLAFDQQTLRNVNDFINKNQGVLGESLAKDLKKKVEKRLTSLPVFNLEDLPISEFEDLIHSHEIDIQDSEVLNIGVNNGKIQDLSGENTPLTLGENLHINDSKILSLQNRKNTLVDTSGYNAEVSEEGDVQLNPIFPFDFKLGSSGEDRGKVIVTQNENIVYNSMYESFSISFWIRINKWVSNLPGYTIIDSVKNNSGWSIGIISNFLVFTLKQNEDSEQSINFSYDISNNAPGYNKWFFVTVTNNMMGNMKIYINGKLIDTIKVKELTGINFSKTITFEINKIPDTGLITSDSDNINMWIRDFYIFAKELDGKDINILFNSLQYTNVVKDYWGNDLRYNKEYYMVNIDYLNRYMYANSRQIVFNTRRNNNDFNEGYKIIIKRIRGNTNDTRVRGGDILYFDMTINNKAYNLFMKNETMYADNHSTEDIYAIGLREQTKDINDNIIFQIQPMNNTYYYASQIFKSNFNGENISGICSIGTYRFRLGGDWYRHNYLVPTVKQGNYASLLESTSTHWGFVPVSE

SEQ ID NO: 16 - protein, 1307 aa, Artificial Sequence
  Synthetic
MVTINDLHYSDPIDEDNIINMRIPLYDLEVDDQFINHNVPDLKAFQVFPNVWVVPERYTFYSTMKNLDAPANPSRSSYYDPTYLQSDAEKEVFLQQMILLFKRINSTQEGQQFLNLLSRSIPVPYESNGDVAMGTTQVIKQMDDKGNVLKHRRAHIIIYGPGPDLMAKGSKALTKSRETGRGCMAEIYFSPMYHKTYSTKLTNKNSLVDKSVQEFVPDPAVTLIHQLCHGLHALYGIDLGNVGSWEFNSNPNSLFSSWFSSKEAVNFEEVMTFGGEDVKVIKSEIDKKIPGILNLIKTTVEPIINKITDPHDEMLQCLQSKYPSLKGTLGQFFFDDTQLEKDIRDLWMVMNETMFAENLKALTAARFLVPKVENIVQVDILSPNVYTIDKGFNHLSKGFKGQSVSQSYFRKISALARGAVVRACPNPHFSSQRGLSSCIEILEDDLFIMSSKDSFTDTDFSEPSVGPVSYKAKKGADTILDSTLSNYDFSKEINFTSTVPIITVEDPLETDEDVPVISEDRTVYVDDYTTFHFLEAQKIGKEVVPTQTKVVFTTNMEEALFDSKKVYTVFENTASRINEAGTGIANGMMFYQWLKGIVQDFTEEATQKDTFDKISDVTMIVPYLGNILNIGNDIRKGDFMGAVELGGVTILLEAIPELTLPVLIGLTIIEDELEKEQVSQTVYNVLDKRDEKWEEVYGFVKQQWWWMVHTQFETRILHAYQALNHQVEAIKANMTYQLANYRGNQEDKELLEKAIDDTLQSLYYAVDQAMHNIKRFLIQSSKSYLLNQMLPKTKEQLLAFDQQTLRNVNDFINKNQGVLGESLAKDLKKKVEKRLTSLPVFNLEDLPISEFEDLIHSHEIDIQDSEVLNIGVNNGKIQDLSGENTPLTLGENLHINDSKILSLQNKKNALVDTSGYNAEVRVGDNVQLNTIYTNDFKLSSSGDKIIVNLNNNILYSAIYENSSVSFWIKISKDLTNSHNEYTIINSIEQNSGWKLCIRNGNIEWILQDVNRKYKSLIFDYSESLSHTGYTNKWFFVTITNNIMGYMKLYINGELKQSQKIEDLDEVKLDKTIVFGIDENIDENQMLWIRDFNIFSKELSNEDINIVYEGQILRNVIKDYWGNPLKFDTEYYIINDNYIDRYIAPESNVLVLVQYPDRSKLYTGNPITIKSVSDKNPYSRILNGDNIILHMLYNSRKYMIIRDTDTIYATQGGECSQNCVYALKLQSNLGNYGIGIFSIKNIVSKNKYCSQIFSSFRENTMLLADIYKPWRFSFKNAYTPVAVTNYETKLLSTSSFWKFISRDPGWVE

SEQ ID NO: 17 - protein, 1300 aa, Artificial Sequence
  Synthetic
MVTINDLHYSDPIDEDNIINMRIPLYDLEVDDQFINHNVPDLKAFQVFPNVWVVPERYTFYSTMKNLDAPANPSRSSYYDPTYLQSDAEKEVFLQQMILLFKRINSTQEGQQFLNLLSRSIPVPYESNGDVAMGTTQVIKQMDDKGNVLKHRRAHIIIYGPGPDLMAKGSKALTKSRETGRGCMAEIYFSPMYHKTYSTKLTNKNSLVDKSVQEFVPDPAVTLIHQLCHGLHALYGIDLGNVGSWEFNSNPNSLFSSWFSSKEAVNFEEVMTFGGEDVKVIKSEIDKKIPGILNLIKTTVEPIINKITDPHDEMLQCLQSKYPSLKGTLGQFFFDDTQLEKDIRDLWMVMNETMFAENLKALTAARFLVPKVENIVQVDILSPNVYTIDKGFNHLSKGFKGQSVSQSYFRKISALARGAVVRACPNPHFSSQRGLSSCIEILEDDLFIMSSKDSFTDTDFSEPSVGPVSYKAKKGADTILDSTLSNYDFSKEINFTSTVPIITVEDPLETDEDVPVISEDRTVYVDDYTTFHFLEAQKIGKEVVPTQTKVVFTTNMEEALFDSKKVYTVFENTASRINEAGTGIANGMMFYQWLKGIVQDFTEEATQKDTFDKISDVTMIVPYLGNILNIGNDIRKGDFMGAVELGGVTILLEAIPELTLPVLIGLTIIEDELEKEQVSQTVYNVLDKRDEKWEEVYGFVKQQWWWMVHTQFETRILHAYQALNHQVEAIKANMTYQLANYRGNQEDKELLEKAIDDTLQSLYYAVDQAMHNIKRFLIQSSKSYLLNQMLPKTKEQLLAFDQQTLRNVNDFINKNQGVLGESLAKDLKKKVEKRLTSLPVFNLEDLPISEFEDLIHSHEIDIQDSEVLNIGVNNGKIQDLSGENTPLTLGENLHIKSSSVLNMRYKNDKYVDTSGYDSNININGDVYKYPTNKNQFGIYNDKLSEVNISQNDYIIYDNKYKNFSISFWVRIPNYDNKIVNVNNEYTIINCMRDNNSGWKVSLNHNEIIWTLQDNAGINQKLAFNYGNANGISDYINKWIFVTITNDRLGDSKLYINGNLIDQKSILNLGNIHVSDNILFKIVNCSYTRYIGIRYFNIFDKELDETEIQTLYSNEPNTNILKDFWGNYLLYDKEYYLLNVLKPNNFIDRRKDSTLSINNIRSTILLANRLYSGIKVKIQRVNNSSTNDNLVRKNDQVYINFVASKTHLFPLYADTATTNKEKTIKISSSGNRFNQVVVMNSVGNNCTMNFKNNNGNNIGLLGFKADTVVASTWYYTHMRDHTNSNGCFWNFISEEHGWQEK

SEQ ID NO: 18 - protein, 1307 aa, Artificial Sequence
  Synthetic
MVTINDLHYSDPIDEDNIINMRIPLYDLEVDDQFINHNVPDLKAFQVFPNVWVVPERYTFYSTMKNLDAPANPSRSSYYDPTYLQSDAEKEVFLQQMILLFKRINSTQEGQQFLNLLSRSIPVPYESNGDVAMGTTQVIKQMDDKGNVLKHRRAHIIIYGPGPDLMAKGSKALTKSRETGRGCMAEIYFSPMYHKTYSTKLTNKNSLVDKSVQEFVPDPAVTLIHQLCHGLHALYGIDLGNVGSWEFNSNPNSLFSSWFSSKEAVNFEEVMTFGGEDVKVIKSEIDKKIPGILNLIKTTVEPIINKITDPHDEMLQCLQSKYPSLKGTLGQFFFDDTQLEKDIRDLWMVMNETMFAENLKALTAARFLVPKVENIVQVDILSPNVYTIDKGFNHLSKGFKGQSVSQSYFRKISALARGAVVRACPNPHFSSQRGLSSCIEILEDDLFIMSSKDSFTDTDFSEPSVGPVSYKAKKGADTILDSTLSNYDFSKEINFTSTVPIITVEDPLETDEDVPVISEDRTVYVDDYTTFHFLEAQKIGKEVVPTQTKVVFTTNMEEALFDSKKVYTVFENTASRINEAGTGIANGMMFYQWLKGIVQDFTEEATQKDTFDKISDVTMIVPYLGNILNIGNDIRKGDFMGAVELGGVTILLEAIPELTLPVLIGLTIIEDELEKEQVSQTVYNVLDKRDEKWEEVYGFVKQQWWWMVHTQFETRILHAYQALNHQVEAIKANMTYQLANYRGNQEDKELLEKAIDDTLQSLYYAVDQAMHNIKRFLIQSSKSYLLNQMLPKTKEQLLAFDQQTLRNVNDFINKNQGVLGESLAKDLKKKVEKRLTSLPVFNLEDLPISEFEDLIHSHEIDIQDSEVLNIGVNNGKIQDLSGENTPLTLGENLHIKDNSILDMRYENNKFIDISGYGSNISINGDVYIYSTNRNQFGIYSSKPSEVNIAQNNDIIYNGRYQNFSISFWVRIPKYFNKVNLNNEYTIIDCIRNNNSGWKISLNYNKIIWTLQDTAGNNQKLVFNYTQMISISDYINKWIFVTITNNRLGNSRIYINGNLIDEKSISNLGDIHVSDNILFKIVGCNDTRYVGIRYFKVFDTELGKTEIETLYSDEPDPSILKDFWGNYLLYNKRYYLLNLLRTDKSITQNSNFLNINQQRGVYQKPNIFSNTRLYTGVEVIIRKNGSTDISNTDNFVRKNDLAYINVVDRDVEYRLYADISIAKPEKIIKLIRTSNSNNSLGQIIVMDSIGNNCTMNFQNNNGGNIGLLGFHSNNLVASSWYYNNIRKNTSSNGCFWSFISKEHGWQEN

SEQ ID NO: 19 - protein, 1327 aa, Artificial Sequence
  Synthetic
MVTINDLHYSDPIDEDNIINMRIPLYDLEVDDQFINHNVPDLKAFQVFPNVWVVPERYTFYSTMKNLDAPANPSRSSYYDPTYLQSDAEKEVFLQQMILLFKRINSTQEGQQFLNLLSRSIPVPYESNGDVAMGTTQVIKQMDDKGNVLKHRRAHIIIYGPGPDLMAKGSKALTKSRETGRGCMAEIYFSPMYHKTYSTKLTNKNSLVDKSVQEFVPDPAVTLIHQLCHGLHALYGIDLGNVGSWEFNSNPNSLFSSWFSSKEAVNFEEVMTFGGEDVKVIKSEIDKKIPGILNLIKTTVEPIINKITDPHDEMLQCLQSKYPSLKGTLGQFFFDDTQLEKDIRDLWMVMNETMFAENLKALTAARFLVPKVENIVQVDILSPNVYTIDKGFNHLSKGFKGQSVSQSYFRKISALARGAVVRACPNPHFSSQRGLSSCIEILEDDLFIMSSKDSFTDTDFSEPSVGPVSYKAKKGADTILDSTLSNYDFSKEINFTSTVPIITVEDPLETDEDVPVISEDRTVYVDDYTTFHFLEAQKIGKEVVPTQTKVVFTTNMEEALFDSKKVYTVFENTASRINEAGTGIANGMMFYQWLKGIVQDFTEEATQKDTFDKISDVTMIVPYLGNILNIGNDIRKGDFMGAVELGGVTILLEAIPELTLPVLIGLTIIEDELEKEQVSQTVYNVLDKRDEKWEEVYGFVKQQWWWMVHTQFETRILHAYQALNHQVEAIKANMTYQLANYRGNQEDKELLEKAIDDTLQSLYYAVDQAMHNIKRFLIQSSKSYLLNQMLPKTKEQLLAFDQQTLRNVNDFINKNQGVLGESLAKDLKKKVEKRLTSLPVFNLEDLPISEFEDLIHSHEIDIQDSEVLNIGVNNGKIQDLSGENTPLTLGENLHISSNAILSLSYRGGRLIDSSGYGATMNVGSDVIFNDIGNGQFKLNNSENSNITAHQSKFVVYDSMFDNFSINFWVRTPKYNNNDIQTYLQNEYTIISCIKNDSGWKVSIKGNRIIWTLIDVNAKSKSIFFEYSIKDNISDYINKWFSITITNDRLGNANIYINGSLKKSEKILNLDRINSSNDIDFKLINCTDTTKFVWIKDFNIFGRELNATEVSSLYWIQSSTNTLKDFWGNPLRYDTQYYLFNQGMQNIYIKYFSKASMGETAPRTNFNNAAINYQNLYLGLRFIIKKASNSRNINNDNIVREGDYIYLNIDNISDESYRVYVLVNSKEIQTQLFLAPINDDPTFYDVLQIKKYYEKTTYNCQILCEKDTKTFGLFGIGKFVKDYGYVWDTYDNYFCISQWYLRRISENINKLRLGCNWQFIPVDEGWTE

SEQ ID NO: 20 - protein, 1322 aa, Artificial Sequence
  Synthetic
MVTINDLHYSDPIDEDNIINMRIPLYDLEVDDQFINHNVPDLKAFQVFPNVWVVPERYTFYSTMKNLDAPANPSRSSYYDPTYLQSDAEKEVFLQQMILLFKRINSTQEGQQFLNLLSRSIPVPYESNGDVAMGTTQVIKQMDDKGNVLKHRRAHIIIYGPGPDLMAKGSKALTKSRETGRGCMAEIYFSPMYHKTYSTKLTNKNSLVDKSVQEFVPDPAVTLIHQLCHGLHALYGIDLGNVGSWEFNSNPNSLFSSWFSSKEAVNFEEVMTFGGEDVKVIKSEIDKKIPGILNLIKTTVEPIINKITDPHDEMLQCLQSKYPSLKGTLGQFFFDDTQLEKDIRDLWMVMNETMFAENLKALTAARFLVPKVENIVQVDILSPNVYTIDKGFNHLSKGFKGQSVSQSYFRKISALARGAVVRACPNPHFSSQRGLSSCIEILEDDLFIMSSKDSFTDTDFSEPSVGPVSYKAKKGADTILDSTLSNYDFSKEINFTSTVPIITVEDPLETDEDVPVISEDRTVYVDDYTTFHFLEAQKIGKEVVPTQTKVVFTTNMEEALFDSKKVYTVFENTASRINEAGTGIANGMMFYQWLKGIVQDFTEEATQKDTFDKISDVTMIVPYLGNILNIGNDIRKGDFMGAVELGGVTILLEAIPELTLPVLIGLTIIEDELEKEQVSQTVYNVLDKRDEKWEEVYGFVKQQWWWMVHTQFETRILHAYQALNHQVEAIKANMTYQLANYRGNQEDKELLEKAIDDTLQSLYYAVDQAMHNIKRFLIQSSKSYLLNQMLPKTKEQLLAFDQQTLRNVNDFINKNQGVLGESLAKDLKKKVEKRLTSLPVFNLEDLPISEFEDLIHSHEIDIQDSEVLNIGVNNGKIQDLSGENTPLTLGENLHLKYNCILNIKYEMDRDKLVDSSGYRSRINIGTGVKFSEIDKNQVQLSNLESSKIEVILNNGVIYNSMYENFSTSFWIRIPKYFRNINNEYKIISCMQNNSGWEVSLNFSNMNSKIIWTLQDTEGIKKTVVFQYTQNINISDYINRWIFVTITNNRLSNSKIYINGRLINEESISDLGNIHASNNIMFKLDGCRDPHRYIWIKYFNLFDKELNKKEIKDLYDNQSNSGILKDFWGDYLQYDKPYYMLNLYDPNKYLDVNNVGIRGYMYLKGPRGRIVTTNIYLNSTLYMGTKFIIKKYASGNKDNIVRNNDRVYINVVVKNKEYRLATNASQAGVEKILSAVEIPDVGNLSQVVVMKSENDQGIRNKCKMNLQDNNGNDIGFIGFHQFNNIAKLVASNWYNRQIGKASRTFGCSWEFIPVDDGWGESSL

SEQ ID NO: 21 - protein, 911 aa, Artificial Sequence
  Synthetic
MKLEINKFNYNDPIDGINVITMRPPRHSDKINKGKGPFKAFQVIKNIWIVPERYNFTNNTNDLNIPSEPIMEADAIYNPNYLNTPSEKDEFLQGVIKVLERIKSKPEGEKLLELISSSIPLPLVSNGALTLSDNETIAYQENNNIVSNLQANLVIYGPGPDIANNATYGLYSTPISNGEGTLSEVSFSPFYLKPFDESYGNYRSLVNIVNKFVKREFAPDPASTLMHQLVHVTHNLYGISNRNFYYNFDTGKIETSRQQNSLIFEELLTFGGIDSKAISSLIIKKIIETAKNNYTTLISERLNTVTVENDLLKYIKNKIPVQGRLGNFKLDTAEFEKKLNTILFVLNESNLAQRFSILVAKHFLKERPIDPIYVNILDDNSYSTLEGFNISSQGSNDFQGQLLESSYFEKIESNALRAFIKICHKAIDGRSLGGSLVPRGSGGSAAAYNKTLDCIEVENKDLFLISNKDSLNDINLSEEKIKPETTVFFKDKLPPQDITLSNYDFTEANSIPSISQQNILERNEELYEPIRNSLFEIKTIYVDKLTTFHFLEAQNIDESIDSSKIRVELTDSVDEALSNPNKVYSPFKNMSNTINSIETGITSTYIFYQWLRSIVKDFSDETGKIDVIDKSSDTLAIVPYIGPLLNIGNDIRHGDFVGAIELAGITALLEYVPEFTIPILVGLEVIGGELAREQVEAIVNNALDKRDQKWAEVYNITKAQWWGTIHLQINTRLAHTYKALSRQANAIKMNMEFQLANYKGNIDDKAKIKNAISETEILLNKSVEQAMKNTEKFMIKLSNSYLTKEMIPKVQDNLKNFDLETKKTLDKFIKEKEDILGTNLSSSLRRKVSIRLNKNIAFDINDIPFSEFDDLINQYKNEIEDYEVLNLGAEDGKIKDLSGTTSDINIGSDIE

SEQ ID NO: 22 - protein, 911 aa, Artificial Sequence
  Synthetic
MVTINDLHYSDPIDEDNIINMRIPLYDLEVDDQFINHNVPDLKAFQVFPNVWVVPERYTFYSTMKNLDAPANPSRSSYYDPTYLQSDAEKEVFLQQMILLFKRINSTQEGQQFLNLLSRSIPVPYESNGDVAMGTTQVIKQMDDKGNVLKHRRAHIIIYGPGPDLMAKGSKALTKSRETGRGCMAEIYFSPMYHKTYSTKLTNKNSLVDKSVQEFVPDPAVTLIHQLCHGLHALYGIDLGNVGSWEFNSNPNSLFSSWFSSKEAVNFEEVMTFGGEDVKVIKSEIDKKIPGILNLIKTTVEPIINKITDPHDEMLQCLQSKYPSLKGTLGQFFFDDTQLEKDIRDLWMVMNETMFAENLKALTAARFLVPKVENIVQVDILSPNVYTIDKGFNHLSKGFKGQSVSQSYFRKISALARGAVVRACHKAIDGRSLGGSLVPRGSGGSAAAYNKTLDCIEILEDDLFIMSSKDSFTDTDFSEPSVGPVSYKAKKGADTILDSTLSNYDFSKEINFTSTVPIITVEDPLETDEDVPVISEDRTVYVDDYTTFHFLEAQKIGKEVVPTQTKVVFTTNMEEALFDSKKVYTVFENTASRINEAGTGIANGMMFYQWLKGIVQDFTEEATQKDTFDKISDVTMIVPYLGNILNIGNDIRKGDFMGAVELGGVTILLEAIPELTLPVLIGLTIIEDELEKEQVSQTVYNVLDKRDEKWEEVYGFVKQQWWWMVHTQFETRILHAYQALNHQVEAIKANMTYQLANYRGNQEDKELLEKAIDDTLQSLYYAVDQAMHNIKRFLIQSSKSYLLNQMLPKTKEQLLAFDQQTLRNVNDFINKNQGVLGESLAKDLKKKVEKRLTSLPVFNLEDLPISEFEDLIHSHEIDIQDSEVLNIGVNNGKIQDLSGENTPLTLGENLH

SEQ ID NO: 23 - protein, 1336 aa, Artificial Sequence
  Synthetic
MKLEINKFNYNDPIDGINVITMRPPRHSDKINKGKGPFKAFQVIKNIWIVPERYNFTNNTNDLNIPSEPIMEADAIYNPNYLNTPSEKDEFLQGVIKVLERIKSKPEGEKLLELISSSIPLPLVSNGALTLSDNETIAYQENNNIVSNLQANLVIYGPGPDIANNATYGLYSTPISNGEGTLSEVSFSPFYLKPFDESYGNYRSLVNIVNKFVKREFAPDPASTLMHQLVHVTHNLYGISNRNFYYNFDTGKIETSRQQNSLIFEELLTFGGIDSKAISSLIIKKIIETAKNNYTTLISERLNTVTVENDLLKYIKNKIPVQGRLGNFKLDTAEFEKKLNTILFVLNESNLAQRFSILVAKHFLKERPIDPIYVNILDDNSYSTLEGFNISSQGSNDFQGQLLESSYFEKIESNALRAFIKICHKAIDGRSLGGSLVPRGSGGSAAAYNKTLDCIEVENKDLFLISNKDSLNDINLSEEKIKPETTVFFKDKLPPQDITLSNYDFTEANSIPSISQQNILERNEELYEPIRNSLFEIKTIYVDKLTTFHFLEAQNIDESIDSSKIRVELTDSVDEALSNPNKVYSPFKNMSNTINSIETGITSTYIFYQWLRSIVKDFSDETGKIDVIDKSSDTLAIVPYIGPLLNIGNDIRHGDFVGAIELAGITALLEYVPEFTIPILVGLEVIGGELAREQVEAIVNNALDKRDQKWAEVYNITKAQWWGTIHLQINTRLAHTYKALSRQANAIKMNMEFQLANYKGNIDDKAKIKNAISETEILLNKSVEQAMKNTEKFMIKLSNSYLTKEMIPKVQDNLKNFDLETKKTLDKFIKEKEDILGTNLSSSLRRKVSIRLNKNIAFDINDIPFSEFDDLINQYKNEIEDYEVLNLGAEDGKIKDLSGTTSDINIGSDIEIINTSILNLRYESNHLIDLSRYASKINIGSKVNFDPIDKNQIQLFNLESSKIEVILKNAIVYNSMYENFSTSFWIRIPKYFNSISLNNEYTIINCMENNSGWKVSLNYGEIIWTLQDTQEIKQRVVFKYSQMINISDYINRWIFVTITNNRLNNSKIYINGRLIDQKPISNLGNIHASNNIMFKLDGCRDTHRYIWIKYFNLFDKELNEKEIKDLYDNQSNSGILKDFWGDYLQYDKPYYMLNLYDPNKYVDVNNVGIRGYMYLKGPRGSVMTTNIYLNSSLYRGTKFIIKKYASGNKDNIVRNNDRVYINVVVKNKEYRLATNASQAGVEKILSALEIPDVGNLSQVVVMKSKNDQGITNKCKMNLQDNNGNDIGFIGFHQFNNIAKLVASNWYNRQIERSSRTLGCSWEFIPVDDGWGERPLQ

SEQ ID NO: 24 - protein, 1343 aa, Artificial Sequence
  Synthetic
MKLEINKFNYNDPIDGINVITMRPPRHSDKINKGKGPFKAFQVIKNIWIVPERYNFTNNTNDLNIPSEPIMEADAIYNPNYLNTPSEKDEFLQGVIKVLERIKSKPEGEKLLELISSSIPLPLVSNGALTLSDNETIAYQENNNIVSNLQANLVIYGPGPDIANNATYGLYSTPISNGEGTLSEVSFSPFYLKPFDESYGNYRSLVNIVNKFVKREFAPDPASTLMHQLVHVTHNLYGISNRNFYYNFDTGKIETSRQQNSLIFEELLTFGGIDSKAISSLIIKKIIETAKNNYTTLISERLNTVTVENDLLKYIKNKIPVQGRLGNFKLDTAEFEKKLNTILFVLNESNLAQRFSILVAKHFLKERPIDPIYVNILDDNSYSTLEGFNISSQGSNDFQGQLLESSYFEKIESNALRAFIKICHKAIDGRSLGGSLVPRGSGGSAAAYNKTLDCIEVENKDLFLISNKDSLNDINLSEEKIKPETTVFFKDKLPPQDITLSNYDFTEANSIPSISQQNILERNEELYEPIRNSLFEIKTIYVDKLTTFHFLEAQNIDESIDSSKIRVELTDSVDEALSNPNKVYSPFKNMSNTINSIETGITSTYIFYQWLRSIVKDFSDETGKIDVIDKSSDTLAIVPYIGPLLNIGNDIRHGDFVGAIELAGITALLEYVPEFTIPILVGLEVIGGELAREQVEAIVNNALDKRDQKWAEVYNITKAQWWGTIHLQINTRLAHTYKALSRQANAIKMNMEFQLANYKGNIDDKAKIKNAISETEILLNKSVEQAMKNTEKFMIKLSNSYLTKEMIPKVQDNLKNFDLETKKTLDKFIKEKEDILGTNLSSSLRRKVSIRLNKNIAFDINDIPFSEFDDLINQYKNEIEDYEVLNLGAEDGKIKDLSGTTSDINIGSDIEILNNIILNLRYKDNNLIDLSGYGAKVEVYDGVELNDKNQFKLTSSANSKIRVTQNQNIIFNSVFLDFSVSFWIRIPKYKNDGIQNYIHNEYTIINCMKNNSGWKISIRGNRIIWTLIDINGKTKSVFFEYNIREDISEYINRWFFVTITNNLNNAKIYINGKLESNTDIKDIREVIANGEIIFKLDGDIDRTQFIWMKYFSIFNTELSQSNIEERYKIQSYSEYLKDFWGNPLMYNKEYYMFNAGNKNSYIKLKKDSPVGEILTRSKYNQNSKYINYRDLYIGEKFIIRRKSNSQSINDDIVRKEDYIYLDFFNLNQEWRVYTYKYFKKEEEKLFLAPISDSDEFYNTIQIKEYDEQPTYSCQLLFKKDEESTDEIGLIGIHRFYESGIVFEEYKDYFCISKWYLKEVKRKPYNLKLGCNWQFIPKDEGWTE

SEQ ID NO: 25 - protein, 1335 aa, Artificial Sequence
  Synthetic
MKLEINKFNYNDPIDGINVITMRPPRHSDKINKGKGPFKAFQVIKNIWIVPERYNFTNNTNDLNIPSEPIMEADAIYNPNYLNTPSEKDEFLQGVIKVLERIKSKPEGEKLLELISSSIPLPLVSNGALTLSDNETIAYQENNNIVSNLQANLVIYGPGPDIANNATYGLYSTPISNGEGTLSEVSFSPFYLKPFDESYGNYRSLVNIVNKFVKREFAPDPASTLMHQLVHVTHNLYGISNRNFYYNFDTGKIETSRQQNSLIFEELLTFGGIDSKAISSLIIKKIIETAKNNYTTLISERLNTVTVENDLLKYIKNKIPVQGRLGNFKLDTAEFEKKLNTILFVLNESNLAQRFSILVAKHFLKERPIDPIYVNILDDNSYSTLEGFNISSQGSNDFQGQLLESSYFEKIESNALRAFIKICHKAIDGRSLGGSLVPRGSGGSAAAYNKTLDCIEVENKDLFLISNKDSLNDINLSEEKIKPETTVFFKDKLPPQDITLSNYDFTEANSIPSISQQNILERNEELYEPIRNSLFEIKTIYVDKLTTFHFLEAQNIDESIDSSKIRVELTDSVDEALSNPNKVYSPFKNMSNTINSIETGITSTYIFYQWLRSIVKDFSDETGKIDVIDKSSDTLAIVPYIGPLLNIGNDIRHGDFVGAIELAGITALLEYVPEFTIPILVGLEVIGGELAREQVEAIVNNALDKRDQKWAEVYNITKAQWWGTIHLQINTRLAHTYKALSRQANAIKMNMEFQLANYKGNIDDKAKIKNAISETEILLNKSVEQAMKNTEKFMIKLSNSYLTKEMIPKVQDNLKNFDLETKKTLDKFIKEKEDILGTNLSSSLRRKVSIRLNKNIAFDINDIPFSEFDDLINQYKNEIEDYEVLNLGAEDGKIKDLSGTTSDINIGSDIEINDSKILSLQNRKNTLVDTSGYNAEVSEEGDVQLNPIFPFDFKLGSSGEDRGKVIVTQNENIVYNSMYESFSISFWIRINKWVSNLPGYTIIDSVKNNSGWSIGIISNFLVFTLKQNEDSEQSINFSYDISNNAPGYNKWFFVTVTNNMMGNMKIYINGKLIDTIKVKELTGINFSKTITFEINKIPDTGLITSDSDNINMWIRDFYIFAKELDGKDINILFNSLQYTNVVKDYWGNDLRYNKEYYMVNIDYLNRYMYANSRQIVFNTRRNNNDFNEGYKIIIKRIRGNTNDTRVRGGDILYFDMTINNKAYNLFMKNETMYADNHSTEDIYAIGLREQTKDINDNIIFQIQPMNNTYYYASQIFKSNFNGENISGICSIGTYRFRLGGDWYRHNYLVPTVKQGNYASLLESTSTHWGFVPVSE

SEQ ID NO: 26 - protein, 1324 aa, Artificial Sequence
  Synthetic
MKLEINKFNYNDPIDGINVITMRPPRHSDKINKGKGPFKAFQVIKNIWIVPERYNFTNNTNDLNIPSEPIMEADAIYNPNYLNTPSEKDEFLQGVIKVLERIKSKPEGEKLLELISSSIPLPLVSNGALTLSDNETIAYQENNNIVSNLQANLVIYGPGPDIANNATYGLYSTPISNGEGTLSEVSFSPFYLKPFDESYGNYRSLVNIVNKFVKREFAPDPASTLMHQLVHVTHNLYGISNRNFYYNFDTGKIETSRQQNSLIFEELLTFGGIDSKAISSLIIKKIIETAKNNYTTLISERLNTVTVENDLLKYIKNKIPVQGRLGNFKLDTAEFEKKLNTILFVLNESNLAQRFSILVAKHFLKERPIDPIYVNILDDNSYSTLEGFNISSQGSNDFQGQLLESSYFEKIESNALRAFIKICHKAIDGRSLGGSLVPRGSGGSAAAYNKTLDCIEVENKDLFLISNKDSLNDINLSEEKIKPETTVFFKDKLPPQDITLSNYDFTEANSIPSISQQNILERNEELYEPIRNSLFEIKTIYVDKLTTFHFLEAQNIDESIDSSKIRVELTDSVDEALSNPNKVYSPFKNMSNTINSIETGITSTYIFYQWLRSIVKDFSDETGKIDVIDKSSDTLAIVPYIGPLLNIGNDIRHGDFVGAIELAGITALLEYVPEFTIPILVGLEVIGGELAREQVEAIVNNALDKRDQKWAEVYNITKAQWWGTIHLQINTRLAHTYKALSRQANAIKMNMEFQLANYKGNIDDKAKIKNAISETEILLNKSVEQAMKNTEKFMIKLSNSYLTKEMIPKVQDNLKNFDLETKKTLDKFIKEKEDILGTNLSSSLRRKVSIRLNKNIAFDINDIPFSEFDDLINQYKNEIEDYEVLNLGAEDGKIKDLSGTTSDINIGSDIEINDSKILSLQNKKNALVDTSGYNAEVRVGDNVQLNTIYTNDFKLSSSGDKIIVNLNNNILYSAIYENSSVSFWIKISKDLTNSHNEYTIINSIEQNSGWKLCIRNGNIEWILQDVNRKYKSLIFDYSESLSHTGYTNKWFFVTITNNIMGYMKLYINGELKQSQKIEDLDEVKLDKTIVFGIDENIDENQMLWIRDFNIFSKELSNEDINIVYEGQILRNVIKDYWGNPLKFDTEYYIINDNYIDRYIAPESNVLVLVQYPDRSKLYTGNPITIKSVSDKNPYSRILNGDNIILHMLYNSRKYMIIRDTDTIYATQGGECSQNCVYALKLQSNLGNYGIGIFSIKNIVSKNKYCSQIFSSFRENTMLLADIYKPWRFSFKNAYTPVAVTNYETKLLSTSSFWKFISRDPGWVE

SEQ ID NO: 27 - protein, 1317 aa, Artificial Sequence
  Synthetic
MKLEINKFNYNDPIDGINVITMRPPRHSDKINKGKGPFKAFQVIKNIWIVPERYNFTNNTNDLNIPSEPIMEADAIYNPNYLNTPSEKDEFLQGVIKVLERIKSKPEGEKLLELISSSIPLPLVSNGALTLSDNETIAYQENNNIVSNLQANLVIYGPGPDIANNATYGLYSTPISNGEGTLSEVSFSPFYLKPFDESYGNYRSLVNIVNKFVKREFAPDPASTLMHQLVHVTHNLYGISNRNFYYNFDTGKIETSRQQNSLIFEELLTFGGIDSKAISSLIIKKIIETAKNNYTTLISERLNTVTVENDLLKYIKNKIPVQGRLGNFKLDTAEFEKKLNTILFVLNESNLAQRFSILVAKHFLKERPIDPIYVNILDDNSYSTLEGFNISSQGSNDFQGQLLESSYFEKIESNALRAFIKICHKAIDGRSLGGSLVPRGSGGSAAAYNKTLDCIEVENKDLFLISNKDSLNDINLSEEKIKPETTVFFKDKLPPQDITLSNYDFTEANSIPSISQQNILERNEELYEPIRNSLFEIKTIYVDKLTTFHFLEAQNIDESIDSSKIRVELTDSVDEALSNPNKVYSPFKNMSNTINSIETGITSTYIFYQWLRSIVKDFSDETGKIDVIDKSSDTLAIVPYIGPLLNIGNDIRHGDFVGAIELAGITALLEYVPEFTIPILVGLEVIGGELAREQVEAIVNNALDKRDQKWAEVYNITKAQWWGTIHLQINTRLAHTYKALSRQANAIKMNMEFQLANYKGNIDDKAKIKNAISETEILLNKSVEQAMKNTEKFMIKLSNSYLTKEMIPKVQDNLKNFDLETKKTLDKFIKEKEDILGTNLSSSLRRKVSIRLNKNIAFDINDIPFSEFDDLINQYKNEIEDYEVLNLGAEDGKIKDLSGTTSDINIGSDIEIKSSSVLNMRYKNDKYVDTSGYDSNININGDVYKYPTNKNQFGIYNDKLSEVNISQNDYIIYDNKYKNFSISFWVRIPNYDNKIVNVNNEYTIINCMRDNNSGWKVSLNHNEIIWTLQDNAGINQKLAFNYGNANGISDYINKWIFVTITNDRLGDSKLYINGNLIDQKSILNLGNIHVSDNILFKIVNCSYTRYIGIRYFNIFDKELDETEIQTLYSNEPNTNILKDFWGNYLLYDKEYYLLNVLKPNNFIDRRKDSTLSINNIRSTILLANRLYSGIKVKIQRVNNSSTNDNLVRKNDQVYINFVASKTHLFPLYADTATTNKEKTIKISSSGNRFNQVVVMNSVGNNCTMNFKNNNGNNIGLLGFKADTVVASTWYYTHMRDHTNSNGCFWNFISEEHGWQEK

SEQ ID NO: 28 - protein, 1324 aa, Artificial Sequence
  Synthetic
MKLEINKFNYNDPIDGINVITMRPPRHSDKINKGKGPFKAFQVIKNIWIVPERYNFTNNTNDLNIPSEPIMEADAIYNPNYLNTPSEKDEFLQGVIKVLERIKSKPEGEKLLELISSSIPLPLVSNGALTLSDNETIAYQENNNIVSNLQANLVIYGPGPDIANNATYGLYSTPISNGEGTLSEVSFSPFYLKPFDESYGNYRSLVNIVNKFVKREFAPDPASTLMHQLVHVTHNLYGISNRNFYYNFDTGKIETSRQQNSLIFEELLTFGGIDSKAISSLIIKKIIETAKNNYTTLISERLNTVTVENDLLKYIKNKIPVQGRLGNFKLDTAEFEKKLNTILFVLNESNLAQRFSILVAKHFLKERPIDPIYVNILDDNSYSTLEGFNISSQGSNDFQGQLLESSYFEKIESNALRAFIKICHKAIDGRSLGGSLVPRGSGGSAAAYNKTLDCIEVENKDLFLISNKDSLNDINLSEEKIKPETTVFFKDKLPPQDITLSNYDFTEANSIPSISQQNILERNEELYEPIRNSLFEIKTIYVDKLTTFHFLEAQNIDESIDSSKIRVELTDSVDEALSNPNKVYSPFKNMSNTINSIETGITSTYIFYQWLRSIVKDFSDETGKIDVIDKSSDTLAIVPYIGPLLNIGNDIRHGDFVGAIELAGITALLEYVPEFTIPILVGLEVIGGELAREQVEAIVNNALDKRDQKWAEVYNITKAQWWGTIHLQINTRLAHTYKALSRQANAIKMNMEFQLANYKGNIDDKAKIKNAISETEILLNKSVEQAMKNTEKFMIKLSNSYLTKEMIPKVQDNLKNFDLETKKTLDKFIKEKEDILGTNLSSSLRRKVSIRLNKNIAFDINDIPFSEFDDLINQYKNEIEDYEVLNLGAEDGKIKDLSGTTSDINIGSDIEIKDNSILDMRYENNKFIDISGYGSNISINGDVYIYSTNRNQFGIYSSKPSEVNIAQNNDIIYNGRYQNFSISFWVRIPKYFNKVNLNNEYTIIDCIRNNNSGWKISLNYNKIIWTLQDTAGNNQKLVFNYTQMISISDYINKWIFVTITNNRLGNSRIYINGNLIDEKSISNLGDIHVSDNILFKIVGCNDTRYVGIRYFKVFDTELGKTEIETLYSDEPDPSILKDFWGNYLLYNKRYYLLNLLRTDKSITQNSNFLNINQQRGVYQKPNIFSNTRLYTGVEVIIRKNGSTDISNTDNFVRKNDLAYINVVDRDVEYRLYADISIAKPEKIIKLIRTSNSNNSLGQIIVMDSIGNNCTMNFQNNNGGNIGLLGFHSNNLVASSWYYNNIRKNTSSNGCFWSFISKEHGWQEN

SEQ ID NO: 29 - protein, 1344 aa, Artificial Sequence
  Synthetic
MKLEINKFNYNDPIDGINVITMRPPRHSDKINKGKGPFKAFQVIKNIWIVPERYNFTNNTNDLNIPSEPIMEADAIYNPNYLNTPSEKDEFLQGVIKVLERIKSKPEGEKLLELISSSIPLPLVSNGALTLSDNETIAYQENNNIVSNLQANLVIYGPGPDIANNATYGLYSTPISNGEGTLSEVSFSPFYLKPFDESYGNYRSLVNIVNKFVKREFAPDPASTLMHQLVHVTHNLYGISNRNFYYNFDTGKIETSRQQNSLIFEELLTFGGIDSKAISSLIIKKIIETAKNNYTTLISERLNTVTVENDLLKYIKNKIPVQGRLGNFKLDTAEFEKKLNTILFVLNESNLAQRFSILVAKHFLKERPIDPIYVNILDDNSYSTLEGFNISSQGSNDFQGQLLESSYFEKIESNALRAFIKICHKAIDGRSLGGSLVPRGSGGSAAAYNKTLDCIEVENKDLFLISNKDSLNDINLSEEKIKPETTVFFKDKLPPQDITLSNYDFTEANSIPSISQQNILERNEELYEPIRNSLFEIKTIYVDKLTTFHFLEAQNIDESIDSSKIRVELTDSVDEALSNPNKVYSPFKNMSNTINSIETGITSTYIFYQWLRSIVKDFSDETGKIDVIDKSSDTLAIVPYIGPLLNIGNDIRHGDFVGAIELAGITALLEYVPEFTIPILVGLEVIGGELAREQVEAIVNNALDKRDQKWAEVYNITKAQWWGTIHLQINTRLAHTYKALSRQANAIKMNMEFQLANYKGNIDDKAKIKNAISETEILLNKSVEQAMKNTEKFMIKLSNSYLTKEMIPKVQDNLKNFDLETKKTLDKFIKEKEDILGTNLSSSLRRKVSIRLNKNIAFDINDIPFSEFDDLINQYKNEIEDYEVLNLGAEDGKIKDLSGTTSDINIGSDIEISSNAILSLSYRGGRLIDSSGYGATMNVGSDVIFNDIGNGQFKLNNSENSNITAHQSKFVVYDSMFDNFSINFWVRTPKYNNNDIQTYLQNEYTIISCIKNDSGWKVSIKGNRIIWTLIDVNAKSKSIFFEYSIKDNISDYINKWFSITITNDRLGNANIYINGSLKKSEKILNLDRINSSNDIDFKLINCTDTTKFVWIKDFNIFGRELNATEVSSLYWIQSSTNTLKDFWGNPLRYDTQYYLFNQGMQNIYIKYFSKASMGETAPRTNFNNAAINYQNLYLGLRFIIKKASNSRNINNDNIVREGDYIYLNIDNISDESYRVYVLVNSKEIQTQLFLAPINDDPTFYDVLQIKKYYEKTTYNCQILCEKDTKTFGLFGIGKFVKDYGYVWDTYDNYFCISQWYLRRISENINKLRLGCNWQFIPVDEGWTE

SEQ ID NO: 30 - protein, 1339 aa, Artificial Sequence
  Synthetic
MKLEINKFNYNDPIDGINVITMRPPRHSDKINKGKGPFKAFQVIKNIWIVPERYNFTNNTNDLNIPSEPIMEADAIYNPNYLNTPSEKDEFLQGVIKVLERIKSKPEGEKLLELISSSIPLPLVSNGALTLSDNETIAYQENNNIVSNLQANLVIYGPGPDIANNATYGLYSTPISNGEGTLSEVSFSPFYLKPFDESYGNYRSLVNIVNKFVKREFAPDPASTLMHQLVHVTHNLYGISNRNFYYNFDTGKIETSRQQNSLIFEELLTFGGIDSKAISSLIIKKIIETAKNNYTTLISERLNTVTVENDLLKYIKNKIPVQGRLGNFKLDTAEFEKKLNTILFVLNESNLAQRFSILVAKHFLKERPIDPIYVNILDDNSYSTLEGFNISSQGSNDFQGQLLESSYFEKIESNALRAFIKICHKAIDGRSLGGSLVPRGSGGSAAAYNKTLDCIEVENKDLFLISNKDSLNDINLSEEKIKPETTVFFKDKLPPQDITLSNYDFTEANSIPSISQQNILERNEELYEPIRNSLFEIKTIYVDKLTTFHFLEAQNIDESIDSSKIRVELTDSVDEALSNPNKVYSPFKNMSNTINSIETGITSTYIFYQWLRSIVKDFSDETGKIDVIDKSSDTLAIVPYIGPLLNIGNDIRHGDFVGAIELAGITALLEYVPEFTIPILVGLEVIGGELAREQVEAIVNNALDKRDQKWAEVYNITKAQWWGTIHLQINTRLAHTYKALSRQANAIKMNMEFQLANYKGNIDDKAKIKNAISETEILLNKSVEQAMKNTEKFMIKLSNSYLTKEMIPKVQDNLKNFDLETKKTLDKFIKEKEDILGTNLSSSLRRKVSIRLNKNIAFDINDIPFSEFDDLINQYKNEIEDYEVLNLGAEDGKIKDLSGTTSDINIGSDIELKYNCILNIKYEMDRDKLVDSSGYRSRINIGTGVKFSEIDKNQVQLSNLESSKIEVILNNGVIYNSMYENFSTSFWIRIPKYFRNINNEYKIISCMQNNSGWEVSLNFSNMNSKIIWTLQDTEGIKKTVVFQYTQNINISDYINRWIFVTITNNRLSNSKIYINGRLINEESISDLGNIHASNNIMFKLDGCRDPHRYIWIKYFNLFDKELNKKEIKDLYDNQSNSGILKDFWGDYLQYDKPYYMLNLYDPNKYLDVNNVGIRGYMYLKGPRGRIVTTNIYLNSTLYMGTKFIIKKYASGNKDNIVRNNDRVYINVVVKNKEYRLATNASQAGVEKILSAVEIPDVGNLSQVVVMKSENDQGIRNKCKMNLQDNNGNDIGFIGFHQFNNIAKLVASNWYNRQIGKASRTFGCSWEFIPVDDGWGESSL

SEQ ID NO: 31 - protein, 1336 aa, Artificial Sequence
  Synthetic
MVTINDLHYSDPIDEDNIINMRIPLYDLEVDDQFINHNVPDLKAFQVFPNVWVVPERYTFYSTMKNLDAPANPSRSSYYDPTYLQSDAEKEVFLQQMILLFKRINSTQEGQQFLNLLSRSIPVPYESNGDVAMGTTQVIKQMDDKGNVLKHRRAHIIIYGPGPDLMAKGSKALTKSRETGRGCMAEIYFSPMYHKTYSTKLTNKNSLVDKSVQEFVPDPAVTLIHQLCHGLHALYGIDLGNVGSWEFNSNPNSLFSSWFSSKEAVNFEEVMTFGGEDVKVIKSEIDKKIPGILNLIKTTVEPIINKITDPHDEMLQCLQSKYPSLKGTLGQFFFDDTQLEKDIRDLWMVMNETMFAENLKALTAARFLVPKVENIVQVDILSPNVYTIDKGFNHLSKGFKGQSVSQSYFRKISALARGAVVRACHKAIDGRSLGGSLVPRGSGGSAAAYNKTLDCIEILEDDLFIMSSKDSFTDTDFSEPSVGPVSYKAKKGADTILDSTLSNYDFSKEINFTSTVPIITVEDPLETDEDVPVISEDRTVYVDDYTTFHFLEAQKIGKEVVPTQTKVVFTTNMEEALFDSKKVYTVFENTASRINEAGTGIANGMMFYQWLKGIVQDFTEEATQKDTFDKISDVTMIVPYLGNILNIGNDIRKGDFMGAVELGGVTILLEAIPELTLPVLIGLTIIEDELEKEQVSQTVYNVLDKRDEKWEEVYGFVKQQWWWMVHTQFETRILHAYQALNHQVEAIKANMTYQLANYRGNQEDKELLEKAIDDTLQSLYYAVDQAMHNIKRFLIQSSKSYLLNQMLPKTKEQLLAFDQQTLRNVNDFINKNQGVLGESLAKDLKKKVEKRLTSLPVFNLEDLPISEFEDLIHSHEIDIQDSEVLNIGVNNGKIQDLSGENTPLTLGENLHIINTSILNLRYESNHLIDLSRYASKINIGSKVNFDPIDKNQIQLFNLESSKIEVILKNAIVYNSMYENFSTSFWIRIPKYFNSISLNNEYTIINCMENNSGWKVSLNYGEIIWTLQDTQEIKQRVVFKYSQMINISDYINRWIFVTITNNRLNNSKIYINGRLIDQKPISNLGNIHASNNIMFKLDGCRDTHRYIWIKYFNLFDKELNEKEIKDLYDNQSNSGILKDFWGDYLQYDKPYYMLNLYDPNKYVDVNNVGIRGYMYLKGPRGSVMTTNIYLNSSLYRGTKFIIKKYASGNKDNIVRNNDRVYINVVVKNKEYRLATNASQAGVEKILSALEIPDVGNLSQVVVMKSKNDQGITNKCKMNLQDNNGNDIGFIGFHQFNNIAKLVASNWYNRQIERSSRTLGCSWEFIPVDDGWGERPLQ

SEQ ID NO: 32 - protein, 1343 aa, Artificial Sequence
  Synthetic
MVTINDLHYSDPIDEDNIINMRIPLYDLEVDDQFINHNVPDLKAFQVFPNVWVVPERYTFYSTMKNLDAPANPSRSSYYDPTYLQSDAEKEVFLQQMILLFKRINSTQEGQQFLNLLSRSIPVPYESNGDVAMGTTQVIKQMDDKGNVLKHRRAHIIIYGPGPDLMAKGSKALTKSRETGRGCMAEIYFSPMYHKTYSTKLTNKNSLVDKSVQEFVPDPAVTLIHQLCHGLHALYGIDLGNVGSWEFNSNPNSLFSSWFSSKEAVNFEEVMTFGGEDVKVIKSEIDKKIPGILNLIKTTVEPIINKITDPHDEMLQCLQSKYPSLKGTLGQFFFDDTQLEKDIRDLWMVMNETMFAENLKALTAARFLVPKVENIVQVDILSPNVYTIDKGFNHLSKGFKGQSVSQSYFRKISALARGAVVRACHKAIDGRSLGGSLVPRGSGGSAAAYNKTLDCIEILEDDLFIMSSKDSFTDTDFSEPSVGPVSYKAKKGADTILDSTLSNYDFSKEINFTSTVPIITVEDPLETDEDVPVISEDRTVYVDDYTTFHFLEAQKIGKEVVPTQTKVVFTTNMEEALFDSKKVYTVFENTASRINEAGTGIANGMMFYQWLKGIVQDFTEEATQKDTFDKISDVTMIVPYLGNILNIGNDIRKGDFMGAVELGGVTILLEAIPELTLPVLIGLTIIEDELEKEQVSQTVYNVLDKRDEKWEEVYGFVKQQWWWMVHTQFETRILHAYQALNHQVEAIKANMTYQLANYRGNQEDKELLEKAIDDTLQSLYYAVDQAMHNIKRFLIQSSKSYLLNQMLPKTKEQLLAFDQQTLRNVNDFINKNQGVLGESLAKDLKKKVEKRLTSLPVFNLEDLPISEFEDLIHSHEIDIQDSEVLNIGVNNGKIQDLSGENTPLTLGENLHILNNIILNLRYKDNNLIDLSGYGAKVEVYDGVELNDKNQFKLTSSANSKIRVTQNQNIIFNSVFLDFSVSFWIRIPKYKNDGIQNYIHNEYTIINCMKNNSGWKISIRGNRIIWTLIDINGKTKSVFFEYNIREDISEYINRWFFVTITNNLNNAKIYINGKLESNTDIKDIREVIANGEIIFKLDGDIDRTQFIWMKYFSIFNTELSQSNIEERYKIQSYSEYLKDFWGNPLMYNKEYYMFNAGNKNSYIKLKKDSPVGEILTRSKYNQNSKYINYRDLYIGEKFIIRRKSNSQSINDDIVRKEDYIYLDFFNLNQEWRVYTYKYFKKEEEKLFLAPISDSDEFYNTIQIKEYDEQPTYSCQLLFKKDEESTDEIGLIGIHRFYESGIVFEEYKDYFCISKWYLKEVKRKPYNLKLGCNWQFIPKDEGWTE

SEQ ID NO: 33 - protein, 1335 aa, Artificial Sequence
  Synthetic
MVTINDLHYSDPIDEDNIINMRIPLYDLEVDDQFINHNVPDLKAFQVFPNVWVVPERYTFYSTMKNLDAPANPSRSSYYDPTYLQSDAEKEVFLQQMILLFKRINSTQEGQQFLNLLSRSIPVPYESNGDVAMGTTQVIKQMDDKGNVLKHRRAHIIIYGPGPDLMAKGSKALTKSRETGRGCMAEIYFSPMYHKTYSTKLTNKNSLVDKSVQEFVPDPAVTLIHQLCHGLHALYGIDLGNVGSWEFNSNPNSLFSSWFSSKEAVNFEEVMTFGGEDVKVIKSEIDKKIPGILNLIKTTVEPIINKITDPHDEMLQCLQSKYPSLKGTLGQFFFDDTQLEKDIRDLWMVMNETMFAENLKALTAARFLVPKVENIVQVDILSPNVYTIDKGFNHLSKGFKGQSVSQSYFRKISALARGAVVRACHKAIDGRSLGGSLVPRGSGGSAAAYNKTLDCIEILEDDLFIMSSKDSFTDTDFSEPSVGPVSYKAKKGADTILDSTLSNYDFSKEINFTSTVPIITVEDPLETDEDVPVISEDRTVYVDDYTTFHFLEAQKIGKEVVPTQTKVVFTTNMEEALFDSKKVYTVFENTASRINEAGTGIANGMMFYQWLKGIVQDFTEEATQKDTFDKISDVTMIVPYLGNILNIGNDIRKGDFMGAVELGGVTILLEAIPELTLPVLIGLTIIEDELEKEQVSQTVYNVLDKRDEKWEEVYGFVKQQWWWMVHTQFETRILHAYQALNHQVEAIKANMTYQLANYRGNQEDKELLEKAIDDTLQSLYYAVDQAMHNIKRFLIQSSKSYLLNQMLPKTKEQLLAFDQQTLRNVNDFINKNQGVLGESLAKDLKKKVEKRLTSLPVFNLEDLPISEFEDLIHSHEIDIQDSEVLNIGVNNGKIQDLSGENTPLTLGENLHINDSKILSLQNRKNTLVDTSGYNAEVSEEGDVQLNPIFPFDFKLGSSGEDRGKVIVTQNENIVYNSMYESFSISFWIRINKWVSNLPGYTIIDSVKNNSGWSIGIISNFLVFTLKQNEDSEQSINFSYDISNNAPGYNKWFFVTVTNNMMGNMKIYINGKLIDTIKVKELTGINFSKTITFEINKIPDTGLITSDSDNINMWIRDFYIFAKELDGKDINILFNSLQYTNVVKDYWGNDLRYNKEYYMVNIDYLNRYMYANSRQIVFNTRRNNNDFNEGYKIIIKRIRGNTNDTRVRGGDILYFDMTINNKAYNLFMKNETMYADNHSTEDIYAIGLREQTKDINDNIIFQIQPMNNTYYYASQIFKSNFNGENISGICSIGTYRFRLGGDWYRHNYLVPTVKQGNYASLLESTSTHWGFVPVSE

SEQ ID NO: 34 - protein, 1324 aa, Artificial Sequence
  Synthetic
MVTINDLHYSDPIDEDNIINMRIPLYDLEVDDQFINHNVPDLKAFQVFPNVWVVPERYTFYSTMKNLDAPANPSRSSYYDPTYLQSDAEKEVFLQQMILLFKRINSTQEGQQFLNLLSRSIPVPYESNGDVAMGTTQVIKQMDDKGNVLKHRRAHIIIYGPGPDLMAKGSKALTKSRETGRGCMAEIYFSPMYHKTYSTKLTNKNSLVDKSVQEFVPDPAVTLIHQLCHGLHALYGIDLGNVGSWEFNSNPNSLFSSWFSSKEAVNFEEVMTFGGEDVKVIKSEIDKKIPGILNLIKTTVEPIINKITDPHDEMLQCLQSKYPSLKGTLGQFFFDDTQLEKDIRDLWMVMNETMFAENLKALTAARFLVPKVENIVQVDILSPNVYTIDKGFNHLSKGFKGQSVSQSYFRKISALARGAVVRACHKAIDGRSLGGSLVPRGSGGSAAAYNKTLDCIEILEDDLFIMSSKDSFTDTDFSEPSVGPVSYKAKKGADTILDSTLSNYDFSKEINFTSTVPIITVEDPLETDEDVPVISEDRTVYVDDYTTFHFLEAQKIGKEVVPTQTKVVFTTNMEEALFDSKKVYTVFENTASRINEAGTGIANGMMFYQWLKGIVQDFTEEATQKDTFDKISDVTMIVPYLGNILNIGNDIRKGDFMGAVELGGVTILLEAIPELTLPVLIGLTIIEDELEKEQVSQTVYNVLDKRDEKWEEVYGFVKQQWWWMVHTQFETRILHAYQALNHQVEAIKANMTYQLANYRGNQEDKELLEKAIDDTLQSLYYAVDQAMHNIKRFLIQSSKSYLLNQMLPKTKEQLLAFDQQTLRNVNDFINKNQGVLGESLAKDLKKKVEKRLTSLPVFNLEDLPISEFEDLIHSHEIDIQDSEVLNIGVNNGKIQDLSGENTPLTLGENLHINDSKILSLQNKKNALVDTSGYNAEVRVGDNVQLNTIYTNDFKLSSSGDKIIVNLNNNILYSAIYENSSVSFWIKISKDLTNSHNEYTIINSIEQNSGWKLCIRNGNIEWILQDVNRKYKSLIFDYSESLSHTGYTNKWFFVTITNNIMGYMKLYINGELKQSQKIEDLDEVKLDKTIVFGIDENIDENQMLWIRDFNIFSKELSNEDINIVYEGQILRNVIKDYWGNPLKFDTEYYIINDNYIDRYIAPESNVLVLVQYPDRSKLYTGNPITIKSVSDKNPYSRILNGDNIILHMLYNSRKYMIIRDTDTIYATQGGECSQNCVYALKLQSNLGNYGIGIFSIKNIVSKNKYCSQIFSSFRENTMLLADIYKPWRFSFKNAYTPVAVTNYETKLLSTSSFWKFISRDPGWVE

SEQ ID NO: 35 - protein, 1317 aa, Artificial Sequence
  Synthetic
MVTINDLHYSDPIDEDNIINMRIPLYDLEVDDQFINHNVPDLKAFQVFPNVWVVPERYTFYSTMKNLDAPANPSRSSYYDPTYLQSDAEKEVFLQQMILLFKRINSTQEGQQFLNLLSRSIPVPYESNGDVAMGTTQVIKQMDDKGNVLKHRRAHIIIYGPGPDLMAKGSKALTKSRETGRGCMAEIYFSPMYHKTYSTKLTNKNSLVDKSVQEFVPDPAVTLIHQLCHGLHALYGIDLGNVGSWEFNSNPNSLFSSWFSSKEAVNFEEVMTFGGEDVKVIKSEIDKKIPGILNLIKTTVEPIINKITDPHDEMLQCLQSKYPSLKGTLGQFFFDDTQLEKDIRDLWMVMNETMFAENLKALTAARFLVPKVENIVQVDILSPNVYTIDKGFNHLSKGFKGQSVSQSYFRKISALARGAVVRACHKAIDGRSLGGSLVPRGSGGSAAAYNKTLDCIEILEDDLFIMSSKDSFTDTDFSEPSVGPVSYKAKKGADTILDSTLSNYDFSKEINFTSTVPIITVEDPLETDEDVPVISEDRTVYVDDYTTFHFLEAQKIGKEVVPTQTKVVFTTNMEEALFDSKKVYTVFENTASRINEAGTGIANGMMFYQWLKGIVQDFTEEATQKDTFDKISDVTMIVPYLGNILNIGNDIRKGDFMGAVELGGVTILLEAIPELTLPVLIGLTIIEDELEKEQVSQTVYNVLDKRDEKWEEVYGFVKQQWWWMVHTQFETRILHAYQALNHQVEAIKANMTYQLANYRGNQEDKELLEKAIDDTLQSLYYAVDQAMHNIKRFLIQSSKSYLLNQMLPKTKEQLLAFDQQTLRNVNDFINKNQGVLGESLAKDLKKKVEKRLTSLPVFNLEDLPISEFEDLIHSHEIDIQDSEVLNIGVNNGKIQDLSGENTPLTLGENLHIKSSSVLNMRYKNDKYVDTSGYDSNININGDVYKYPTNKNQFGIYNDKLSEVNISQNDYIIYDNKYKNFSISFWVRIPNYDNKIVNVNNEYTIINCMRDNNSGWKVSLNHNEIIWTLQDNAGINQKLAFNYGNANGISDYINKWIFVTITNDRLGDSKLYINGNLIDQKSILNLGNIHVSDNILFKIVNCSYTRYIGIRYFNIFDKELDETEIQTLYSNEPNTNILKDFWGNYLLYDKEYYLLNVLKPNNFIDRRKDSTLSINNIRSTILLANRLYSGIKVKIQRVNNSSTNDNLVRKNDQVYINFVASKTHLFPLYADTATTNKEKTIKISSSGNRFNQVVVMNSVGNNCTMNFKNNNGNNIGLLGFKADTVVASTWYYTHMRDHTNSNGCFWNFISEEHGWQEK

SEQ ID NO: 36 - protein, 1324 aa, Artificial Sequence
  Synthetic
MVTINDLHYSDPIDEDNIINMRIPLYDLEVDDQFINHNVPDLKAFQVFPNVWVVPERYTFYSTMKNLDAPANPSRSSYYDPTYLQSDAEKEVFLQQMILLFKRINSTQEGQQFLNLLSRSIPVPYESNGDVAMGTTQVIKQMDDKGNVLKHRRAHIIIYGPGPDLMAKGSKALTKSRETGRGCMAEIYFSPMYHKTYSTKLTNKNSLVDKSVQEFVPDPAVTLIHQLCHGLHALYGIDLGNVGSWEFNSNPNSLFSSWFSSKEAVNFEEVMTFGGEDVKVIKSEIDKKIPGILNLIKTTVEPIINKITDPHDEMLQCLQSKYPSLKGTLGQFFFDDTQLEKDIRDLWMVMNETMFAENLKALTAARFLVPKVENIVQVDILSPNVYTIDKGFNHLSKGFKGQSVSQSYFRKISALARGAVVRACHKAIDGRSLGGSLVPRGSGGSAAAYNKTLDCIEILEDDLFIMSSKDSFTDTDFSEPSVGPVSYKAKKGADTILDSTLSNYDFSKEINFTSTVPIITVEDPLETDEDVPVISEDRTVYVDDYTTFHFLEAQKIGKEVVPTQTKVVFTTNMEEALFDSKKVYTVFENTASRINEAGTGIANGMMFYQWLKGIVQDFTEEATQKDTFDKISDVTMIVPYLGNILNIGNDIRKGDFMGAVELGGVTILLEAIPELTLPVLIGLTIIEDELEKEQVSQTVYNVLDKRDEKWEEVYGFVKQQWWWMVHTQFETRILHAYQALNHQVEAIKANMTYQLANYRGNQEDKELLEKAIDDTLQSLYYAVDQAMHNIKRFLIQSSKSYLLNQMLPKTKEQLLAFDQQTLRNVNDFINKNQGVLGESLAKDLKKKVEKRLTSLPVFNLEDLPISEFEDLIHSHEIDIQDSEVLNIGVNNGKIQDLSGENTPLTLGENLHIKDNSILDMRYENNKFIDISGYGSNISINGDVYIYSTNRNQFGIYSSKPSEVNIAQNNDIIYNGRYQNFSISFWVRIPKYFNKVNLNNEYTIIDCIRNNNSGWKISLNYNKIIWTLQDTAGNNQKLVFNYTQMISISDYINKWIFVTITNNRLGNSRIYINGNLIDEKSISNLGDIHVSDNILFKIVGCNDTRYVGIRYFKVFDTELGKTEIETLYSDEPDPSILKDFWGNYLLYNKRYYLLNLLRTDKSITQNSNFLNINQQRGVYQKPNIFSNTRLYTGVEVIIRKNGSTDISNTDNFVRKNDLAYINVVDRDVEYRLYADISIAKPEKIIKLIRTSNSNNSLGQIIVMDSIGNNCTMNFQNNNGGNIGLLGFHSNNLVASSWYYNNIRKNTSSNGCFWSFISKEHGWQEN

SEQ ID NO: 37 - protein, 1344 aa, Artificial Sequence
  Synthetic
MVTINDLHYSDPIDEDNIINMRIPLYDLEVDDQFINHNVPDLKAFQVFPNVWVVPERYTFYSTMKNLDAPANPSRSSYYDPTYLQSDAEKEVFLQQMILLFKRINSTQEGQQFLNLLSRSIPVPYESNGDVAMGTTQVIKQMDDKGNVLKHRRAHIIIYGPGPDLMAKGSKALTKSRETGRGCMAEIYFSPMYHKTYSTKLTNKNSLVDKSVQEFVPDPAVTLIHQLCHGLHALYGIDLGNVGSWEFNSNPNSLFSSWFSSKEAVNFEEVMTFGGEDVKVIKSEIDKKIPGILNLIKTTVEPIINKITDPHDEMLQCLQSKYPSLKGTLGQFFFDDTQLEKDIRDLWMVMNETMFAENLKALTAARFLVPKVENIVQVDILSPNVYTIDKGFNHLSKGFKGQSVSQSYFRKISALARGAVVRACHKAIDGRSLGGSLVPRGSGGSAAAYNKTLDCIEILEDDLFIMSSKDSFTDTDFSEPSVGPVSYKAKKGADTILDSTLSNYDFSKEINFTSTVPIITVEDPLETDEDVPVISEDRTVYVDDYTTFHFLEAQKIGKEVVPTQTKVVFTTNMEEALFDSKKVYTVFENTASRINEAGTGIANGMMFYQWLKGIVQDFTEEATQKDTFDKISDVTMIVPYLGNILNIGNDIRKGDFMGAVELGGVTILLEAIPELTLPVLIGLTIIEDELEKEQVSQTVYNVLDKRDEKWEEVYGFVKQQWWWMVHTQFETRILHAYQALNHQVEAIKANMTYQLANYRGNQEDKELLEKAIDDTLQSLYYAVDQAMHNIKRFLIQSSKSYLLNQMLPKTKEQLLAFDQQTLRNVNDFINKNQGVLGESLAKDLKKKVEKRLTSLPVFNLEDLPISEFEDLIHSHEIDIQDSEVLNIGVNNGKIQDLSGENTPLTLGENLHISSNAILSLSYRGGRLIDSSGYGATMNVGSDVIFNDIGNGQFKLNNSENSNITAHQSKFVVYDSMFDNFSINFWVRTPKYNNNDIQTYLQNEYTIISCIKNDSGWKVSIKGNRIIWTLIDVNAKSKSIFFEYSIKDNISDYINKWFSITITNDRLGNANIYINGSLKKSEKILNLDRINSSNDIDFKLINCTDTTKFVWIKDFNIFGRELNATEVSSLYWIQSSTNTLKDFWGNPLRYDTQYYLFNQGMQNIYIKYFSKASMGETAPRTNFNNAAINYQNLYLGLRFIIKKASNSRNINNDNIVREGDYIYLNIDNISDESYRVYVLVNSKEIQTQLFLAPINDDPTFYDVLQIKKYYEKTTYNCQILCEKDTKTFGLFGIGKFVKDYGYVWDTYDNYFCISQWYLRRISENINKLRLGCNWQFIPVDEGWTE

SEQ ID NO: 38 - protein, 1339 aa, Artificial Sequence
  Synthetic
MVTINDLHYSDPIDEDNIINMRIPLYDLEVDDQFINHNVPDLKAFQVFPNVWVVPERYTFYSTMKNLDAPANPSRSSYYDPTYLQSDAEKEVFLQQMILLFKRINSTQEGQQFLNLLSRSIPVPYESNGDVAMGTTQVIKQMDDKGNVLKHRRAHIIIYGPGPDLMAKGSKALTKSRETGRGCMAEIYFSPMYHKTYSTKLTNKNSLVDKSVQEFVPDPAVTLIHQLCHGLHALYGIDLGNVGSWEFNSNPNSLFSSWFSSKEAVNFEEVMTFGGEDVKVIKSEIDKKIPGILNLIKTTVEPIINKITDPHDEMLQCLQSKYPSLKGTLGQFFFDDTQLEKDIRDLWMVMNETMFAENLKALTAARFLVPKVENIVQVDILSPNVYTIDKGFNHLSKGFKGQSVSQSYFRKISALARGAVVRACHKAIDGRSLGGSLVPRGSGGSAAAYNKTLDCIEILEDDLFIMSSKDSFTDTDFSEPSVGPVSYKAKKGADTILDSTLSNYDFSKEINFTSTVPIITVEDPLETDEDVPVISEDRTVYVDDYTTFHFLEAQKIGKEVVPTQTKVVFTTNMEEALFDSKKVYTVFENTASRINEAGTGIANGMMFYQWLKGIVQDFTEEATQKDTFDKISDVTMIVPYLGNILNIGNDIRKGDFMGAVELGGVTILLEAIPELTLPVLIGLTIIEDELEKEQVSQTVYNVLDKRDEKWEEVYGFVKQQWWWMVHTQFETRILHAYQALNHQVEAIKANMTYQLANYRGNQEDKELLEKAIDDTLQSLYYAVDQAMHNIKRFLIQSSKSYLLNQMLPKTKEQLLAFDQQTLRNVNDFINKNQGVLGESLAKDLKKKVEKRLTSLPVFNLEDLPISEFEDLIHSHEIDIQDSEVLNIGVNNGKIQDLSGENTPLTLGENLHLKYNCILNIKYEMDRDKLVDSSGYRSRINIGTGVKFSEIDKNQVQLSNLESSKIEVILNNGVIYNSMYENFSTSFWIRIPKYFRNINNEYKIISCMQNNSGWEVSLNFSNMNSKIIWTLQDTEGIKKTVVFQYTQNINISDYINRWIFVTITNNRLSNSKIYINGRLINEESISDLGNIHASNNIMFKLDGCRDPHRYIWIKYFNLFDKELNKKEIKDLYDNQSNSGILKDFWGDYLQYDKPYYMLNLYDPNKYLDVNNVGIRGYMYLKGPRGRIVTTNIYLNSTLYMGTKFIIKKYASGNKDNIVRNNDRVYINVVVKNKEYRLATNASQAGVEKILSAVEIPDVGNLSQVVVMKSENDQGIRNKCKMNLQDNNGNDIGFIGFHQFNNIAKLVASNWYNRQIGKASRTFGCSWEFIPVDDGWGESSL

SEQ ID NO: 39 - protein, 422 aa, Artificial Sequence
  Synthetic
MKLEINKFNYNDPIDGINVITMRPPRHSDKINKGKGPFKAFQVIKNIWIVPERYNFTNNTNDLNIPSEPIMEADAIYNPNYLNTPSEKDEFLQGVIKVLERIKSKPEGEKLLELISSSIPLPLVSNGALTLSDNETIAYQENNNIVSNLQANLVIYGPGPDIANNATYGLYSTPISNGEGTLSEVSFSPFYLKPFDESYGNYRSLVNIVNKFVKREFAPDPASTLMHQLVHVTHNLYGISNRNFYYNFDTGKIETSRQQNSLIFEELLTFGGIDSKAISSLIIKKIIETAKNNYTTLISERLNTVTVENDLLKYIKNKIPVQGRLGNFKLDTAEFEKKLNTILFVLNESNLAQRFSILVAKHFLKERPIDPIYVNILDDNSYSTLEGFNISSQGSNDFQGQLLESSYFEKIESNALRAFIKI

SEQ ID NO: 40 - protein, 882 aa, Artificial Sequence
  Synthetic
IEVENKDLFLISNKDSLNDINLSEEKIKPETTVFFKDKLPPQDITLSNYDFTEANSIPSISQQNILERNEELYEPIRNSLFEIKTIYVDKLTTFHFLEAQNIDESIDSSKIRVELTDSVDEALSNPNKVYSPFKNMSNTINSIETGITSTYIFYQWLRSIVKDFSDETGKIDVIDKSSDTLAIVPYIGPLLNIGNDIRHGDFVGAIELAGITALLEYVPEFTIPILVGLEVIGGELAREQVEAIVNNALDKRDQKWAEVYNITKAQWWGTIHLQINTRLAHTYKALSRQANAIKMNMEFQLANYKGNIDDKAKIKNAISETEILLNKSVEQAMKNTEKFMIKLSNSYLTKEMIPKVQDNLKNFDLETKKTLDKFIKEKEDILGTNLSSSLRRKVSIRLNKNIAFDINDIPFSEFDDLINQYKNEIEDYEVLNLGAEDGKIKDLSGTTSDINIGSDIEIINTSILNLRYESNHLIDLSRYASKINIGSKVNFDPIDKNQIQLFNLESSKIEVILKNAIVYNSMYENFSTSFWIRIPKYFNSISLNNEYTIINCMENNSGWKVSLNYGEIIWTLQDTQEIKQRVVFKYSQMINISDYINRWIFVTITNNRLNNSKIYINGRLIDQKPISNLGNIHASNNIMFKLDGCRDTHRYIWIKYFNLFDKELNEKEIKDLYDNQSNSGILKDFWGDYLQYDKPYYMLNLYDPNKYVDVNNVGIRGYMYLKGPRGSVMTTNIYLNSSLYRGTKFIIKKYASGNKDNIVRNNDRVYINVVVKNKEYRLATNASQAGVEKILSALEIPDVGNLSQVVVMKSKNDQGITNKCKMNLQDNNGNDIGFIGFHQFNNIAKLVASNWYNRQIERSSRTLGCSWEFIPVDDGWGERPLQ

SEQ ID NO: 41 - protein, 889 aa, Artificial Sequence
  Synthetic
IEVENKDLFLISNKDSLNDINLSEEKIKPETTVFFKDKLPPQDITLSNYDFTEANSIPSISQQNILERNEELYEPIRNSLFEIKTIYVDKLTTFHFLEAQNIDESIDSSKIRVELTDSVDEALSNPNKVYSPFKNMSNTINSIETGITSTYIFYQWLRSIVKDFSDETGKIDVIDKSSDTLAIVPYIGPLLNIGNDIRHGDFVGAIELAGITALLEYVPEFTIPILVGLEVIGGELAREQVEAIVNNALDKRDQKWAEVYNITKAQWWGTIHLQINTRLAHTYKALSRQANAIKMNMEFQLANYKGNIDDKAKIKNAISETEILLNKSVEQAMKNTEKFMIKLSNSYLTKEMIPKVQDNLKNFDLETKKTLDKFIKEKEDILGTNLSSSLRRKVSIRLNKNIAFDINDIPFSEFDDLINQYKNEIEDYEVLNLGAEDGKIKDLSGTTSDINIGSDIEILNNIILNLRYKDNNLIDLSGYGAKVEVYDGVELNDKNQFKLTSSANSKIRVTQNQNIIFNSVFLDFSVSFWIRIPKYKNDGIQNYIHNEYTIINCMKNNSGWKISIRGNRIIWTLIDINGKTKSVFFEYNIREDISEYINRWFFVTITNNLNNAKIYINGKLESNTDIKDIREVIANGEIIFKLDGDIDRTQFIWMKYFSIFNTELSQSNIEERYKIQSYSEYLKDFWGNPLMYNKEYYMFNAGNKNSYIKLKKDSPVGEILTRSKYNQNSKYINYRDLYIGEKFIIRRKSNSQSINDDIVRKEDYIYLDFFNLNQEWRVYTYKYFKKEEEKLFLAPISDSDEFYNTIQIKEYDEQPTYSCQLLFKKDEESTDEIGLIGIHRFYESGIVFEEYKDYFCISKWYLKEVKRKPYNLKLGCNWQFIPKDEGWTE

SEQ ID NO: 42 - protein, 881 aa, Artificial Sequence
  Synthetic
IEVENKDLFLISNKDSLNDINLSEEKIKPETTVFFKDKLPPQDITLSNYDFTEANSIPSISQQNILERNEELYEPIRNSLFEIKTIYVDKLTTFHFLEAQNIDESIDSSKIRVELTDSVDEALSNPNKVYSPFKNMSNTINSIETGITSTYIFYQWLRSIVKDFSDETGKIDVIDKSSDTLAIVPYIGPLLNIGNDIRHGDFVGAIELAGITALLEYVPEFTIPILVGLEVIGGELAREQVEAIVNNALDKRDQKWAEVYNITKAQWWGTIHLQINTRLAHTYKALSRQANAIKMNMEFQLANYKGNIDDKAKIKNAISETEILLNKSVEQAMKNTEKFMIKLSNSYLTKEMIPKVQDNLKNFDLETKKTLDKFIKEKEDILGTNLSSSLRRKVSIRLNKNIAFDINDIPFSEFDDLINQYKNEIEDYEVLNLGAEDGKIKDLSGTTSDINIGSDIEINDSKILSLQNRKNTLVDTSGYNAEVSEEGDVQLNPIFPFDFKLGSSGEDRGKVIVTQNENIVYNSMYESFSISFWIRINKWVSNLPGYTIIDSVKNNSGWSIGIISNFLVFTLKQNEDSEQSINFSYDISNNAPGYNKWFFVTVTNNMMGNMKIYINGKLIDTIKVKELTGINFSKTITFEINKIPDTGLITSDSDNINMWIRDFYIFAKELDGKDINILFNSLQYTNVVKDYWGNDLRYNKEYYMVNIDYLNRYMYANSRQIVFNTRRNNNDFNEGYKIIIKRIRGNTNDTRVRGGDILYFDMTINNKAYNLFMKNETMYADNHSTEDIYAIGLREQTKDINDNIIFQIQPMNNTYYYASQIFKSNFNGENISGICSIGTYRFRLGGDWYRHNYLVPTVKQGNYASLLESTSTHWGFVPVSE

SEQ ID NO: 43 - protein, 870 aa, Artificial Sequence
  Synthetic
IEVENKDLFLISNKDSLNDINLSEEKIKPETTVFFKDKLPPQDITLSNYDFTEANSIPSISQQNILERNEELYEPIRNSLFEIKTIYVDKLTTFHFLEAQNIDESIDSSKIRVELTDSVDEALSNPNKVYSPFKNMSNTINSIETGITSTYIFYQWLRSIVKDFSDETGKIDVIDKSSDTLAIVPYIGPLLNIGNDIRHGDFVGAIELAGITALLEYVPEFTIPILVGLEVIGGELAREQVEAIVNNALDKRDQKWAEVYNITKAQWWGTIHLQINTRLAHTYKALSRQANAIKMNMEFQLANYKGNIDDKAKIKNAISETEILLNKSVEQAMKNTEKFMIKLSNSYLTKEMIPKVQDNLKNFDLETKKTLDKFIKEKEDILGTNLSSSLRRKVSIRLNKNIAFDINDIPFSEFDDLINQYKNEIEDYEVLNLGAEDGKIKDLSGTTSDINIGSDIEINDSKILSLQNKKNALVDTSGYNAEVRVGDNVQLNTIYTNDFKLSSSGDKIIVNLNNNILYSAIYENSSVSFWIKISKDLTNSHNEYTIINSIEQNSGWKLCIRNGNIEWILQDVNRKYKSLIFDYSESLSHTGYTNKWFFVTITNNIMGYMKLYINGELKQSQKIEDLDEVKLDKTIVFGIDENIDENQMLWIRDFNIFSKELSNEDINIVYEGQILRNVIKDYWGNPLKFDTEYYIINDNYIDRYIAPESNVLVLVQYPDRSKLYTGNPITIKSVSDKNPYSRILNGDNIILHMLYNSRKYMIIRDTDTIYATQGGECSQNCVYALKLQSNLGNYGIGIFSIKNIVSKNKYCSQIFSSFRENTMLLADIYKPWRFSFKNAYTPVAVTNYETKLLSTSSFWKFISRDPGWVE

SEQ ID NO: 44 - protein, 863 aa, Artificial Sequence
  Synthetic
IEVENKDLFLISNKDSLNDINLSEEKIKPETTVFFKDKLPPQDITLSNYDFTEANSIPSISQQNILERNEELYEPIRNSLFEIKTIYVDKLTTFHFLEAQNIDESIDSSKIRVELTDSVDEALSNPNKVYSPFKNMSNTINSIETGITSTYIFYQWLRSIVKDFSDETGKIDVIDKSSDTLAIVPYIGPLLNIGNDIRHGDFVGAIELAGITALLEYVPEFTIPILVGLEVIGGELAREQVEAIVNNALDKRDQKWAEVYNITKAQWWGTIHLQINTRLAHTYKALSRQANAIKMNMEFQLANYKGNIDDKAKIKNAISETEILLNKSVEQAMKNTEKFMIKLSNSYLTKEMIPKVQDNLKNFDLETKKTLDKFIKEKEDILGTNLSSSLRRKVSIRLNKNIAFDINDIPFSEFDDLINQYKNEIEDYEVLNLGAEDGKIKDLSGTTSDINIGSDIEIKSSSVLNMRYKNDKYVDTSGYDSNININGDVYKYPTNKNQFGIYNDKLSEVNISQNDYIIYDNKYKNFSISFWVRIPNYDNKIVNVNNEYTIINCMRDNNSGWKVSLNHNEIIWTLQDNAGINQKLAFNYGNANGISDYINKWIFVTITNDRLGDSKLYINGNLIDQKSILNLGNIHVSDNILFKIVNCSYTRYIGIRYFNIFDKELDETEIQTLYSNEPNTNILKDFWGNYLLYDKEYYLLNVLKPNNFIDRRKDSTLSINNIRSTILLANRLYSGIKVKIQRVNNSSTNDNLVRKNDQVYINFVASKTHLFPLYADTATTNKEKTIKISSSGNRFNQVVVMNSVGNNCTMNFKNNNGNNIGLLGFKADTVVASTWYYTHMRDHTNSNGCFWNFISEEHGWQEK

SEQ ID NO: 45 - protein, 870 aa, Artificial Sequence
  Synthetic
IEVENKDLFLISNKDSLNDINLSEEKIKPETTVFFKDKLPPQDITLSNYDFTEANSIPSISQQNILERNEELYEPIRNSLFEIKTIYVDKLTTFHFLEAQNIDESIDSSKIRVELTDSVDEALSNPNKVYSPFKNMSNTINSIETGITSTYIFYQWLRSIVKDFSDETGKIDVIDKSSDTLAIVPYIGPLLNIGNDIRHGDFVGAIELAGITALLEYVPEFTIPILVGLEVIGGELAREQVEAIVNNALDKRDQKWAEVYNITKAQWWGTIHLQINTRLAHTYKALSRQANAIKMNMEFQLANYKGNIDDKAKIKNAISETEILLNKSVEQAMKNTEKFMIKLSNSYLTKEMIPKVQDNLKNFDLETKKTLDKFIKEKEDILGTNLSSSLRRKVSIRLNKNIAFDINDIPFSEFDDLINQYKNEIEDYEVLNLGAEDGKIKDLSGTTSDINIGSDIEIKDNSILDMRYENNKFIDISGYGSNISINGDVYIYSTNRNQFGIYSSKPSEVNIAQNNDIIYNGRYQNFSISFWVRIPKYFNKVNLNNEYTIIDCIRNNNSGWKISLNYNKIIWTLQDTAGNNQKLVFNYTQMISISDYINKWIFVTITNNRLGNSRIYINGNLIDEKSISNLGDIHVSDNILFKIVGCNDTRYVGIRYFKVFDTELGKTEIETLYSDEPDPSILKDFWGNYLLYNKRYYLLNLLRTDKSITQNSNFLNINQQRGVYQKPNIFSNTRLYTGVEVIIRKNGSTDISNTDNFVRKNDLAYINVVDRDVEYRLYADISIAKPEKIIKLIRTSNSNNSLGQIIVMDSIGNNCTMNFQNNNGGNIGLLGFHSNNLVASSWYYNNIRKNTSSNGCFWSFISKEHGWQEN

SEQ ID NO: 46 - protein, 890 aa, Artificial Sequence
  Synthetic
IEVENKDLFLISNKDSLNDINLSEEKIKPETTVFFKDKLPPQDITLSNYDFTEANSIPSISQQNILERNEELYEPIRNSLFEIKTIYVDKLTTFHFLEAQNIDESIDSSKIRVELTDSVDEALSNPNKVYSPFKNMSNTINSIETGITSTYIFYQWLRSIVKDFSDETGKIDVIDKSSDTLAIVPYIGPLLNIGNDIRHGDFVGAIELAGITALLEYVPEFTIPILVGLEVIGGELAREQVEAIVNNALDKRDQKWAEVYNITKAQWWGTIHLQINTRLAHTYKALSRQANAIKMNMEFQLANYKGNIDDKAKIKNAISETEILLNKSVEQAMKNTEKFMIKLSNSYLTKEMIPKVQDNLKNFDLETKKTLDKFIKEKEDILGTNLSSSLRRKVSIRLNKNIAFDINDIPFSEFDDLINQYKNEIEDYEVLNLGAEDGKIKDLSGTTSDINIGSDIEISSNAILSLSYRGGRLIDSSGYGATMNVGSDVIFNDIGNGQFKLNNSENSNITAHQSKFVVYDSMFDNFSINFWVRTPKYNNNDIQTYLQNEYTIISCIKNDSGWKVSIKGNRIIWTLIDVNAKSKSIFFEYSIKDNISDYINKWFSITITNDRLGNANIYINGSLKKSEKILNLDRINSSNDIDFKLINCTDTTKFVWIKDFNIFGRELNATEVSSLYWIQSSTNTLKDFWGNPLRYDTQYYLFNQGMQNIYIKYFSKASMGETAPRTNFNNAAINYQNLYLGLRFIIKKASNSRNINNDNIVREGDYIYLNIDNISDESYRVYVLVNSKEIQTQLFLAPINDDPTFYDVLQIKKYYEKTTYNCQILCEKDTKTFGLFGIGKFVKDYGYVWDTYDNYFCISQWYLRRISENINKLRLGCNWQFIPVDEGWTE

SEQ ID NO: 47 - protein, 885 aa, Artificial Sequence
  Synthetic
IEVENKDLFLISNKDSLNDINLSEEKIKPETTVFFKDKLPPQDITLSNYDFTEANSIPSISQQNILERNEELYEPIRNSLFEIKTIYVDKLTTFHFLEAQNIDESIDSSKIRVELTDSVDEALSNPNKVYSPFKNMSNTINSIETGITSTYIFYQWLRSIVKDFSDETGKIDVIDKSSDTLAIVPYIGPLLNIGNDIRHGDFVGAIELAGITALLEYVPEFTIPILVGLEVIGGELAREQVEAIVNNALDKRDQKWAEVYNITKAQWWGTIHLQINTRLAHTYKALSRQANAIKMNMEFQLANYKGNIDDKAKIKNAISETEILLNKSVEQAMKNTEKFMIKLSNSYLTKEMIPKVQDNLKNFDLETKKTLDKFIKEKEDILGTNLSSSLRRKVSIRLNKNIAFDINDIPFSEFDDLINQYKNEIEDYEVLNLGAEDGKIKDLSGTTSDINIGSDIELKYNCILNIKYEMDRDKLVDSSGYRSRINIGTGVKFSEIDKNQVQLSNLESSKIEVILNNGVIYNSMYENFSTSFWIRIPKYFRNINNEYKIISCMQNNSGWEVSLNFSNMNSKIIWTLQDTEGIKKTVVFQYTQNINISDYINRWIFVTITNNRLSNSKIYINGRLINEESISDLGNIHASNNIMFKLDGCRDPHRYIWIKYFNLFDKELNKKEIKDLYDNQSNSGILKDFWGDYLQYDKPYYMLNLYDPNKYLDVNNVGIRGYMYLKGPRGRIVTTNIYLNSTLYMGTKFIIKKYASGNKDNIVRNNDRVYINVVVKNKEYRLATNASQAGVEKILSAVEIPDVGNLSQVVVMKSENDQGIRNKCKMNLQDNNGNDIGFIGFHQFNNIAKLVASNWYNRQIGKASRTFGCSWEFIPVDDGWGESSL

SEQ ID NO: 48 - protein, 423 aa, Artificial Sequence
  Synthetic
MVTINDLHYSDPIDEDNIINMRIPLYDLEVDDQFINHNVPDLKAFQVFPNVWVVPERYTFYSTMKNLDAPANPSRSSYYDPTYLQSDAEKEVFLQQMILLFKRINSTQEGQQFLNLLSRSIPVPYESNGDVAMGTTQVIKQMDDKGNVLKHRRAHIIIYGPGPDLMAKGSKALTKSRETGRGCMAEIYFSPMYHKTYSTKLTNKNSLVDKSVQEFVPDPAVTLIHQLCHGLHALYGIDLGNVGSWEFNSNPNSLFSSWFSSKEAVNFEEVMTFGGEDVKVIKSEIDKKIPGILNLIKTTVEPIINKITDPHDEMLQCLQSKYPSLKGTLGQFFFDDTQLEKDIRDLWMVMNETMFAENLKALTAARFLVPKVENIVQVDILSPNVYTIDKGFNHLSKGFKGQSVSQSYFRKISALARGAVVRA

SEQ ID NO: 49 - protein, 881 aa, Artificial Sequence
  Synthetic
IEILEDDLFIMSSKDSFTDTDFSEPSVGPVSYKAKKGADTILDSTLSNYDFSKEINFTSTVPIITVEDPLETDEDVPVISEDRTVYVDDYTTFHFLEAQKIGKEVVPTQTKVVFTTNMEEALFDSKKVYTVFENTASRINEAGTGIANGMMFYQWLKGIVQDFTEEATQKDTFDKISDVTMIVPYLGNILNIGNDIRKGDFMGAVELGGVTILLEAIPELTLPVLIGLTIIEDELEKEQVSQTVYNVLDKRDEKWEEVYGFVKQQWWWMVHTQFETRILHAYQALNHQVEAIKANMTYQLANYRGNQEDKELLEKAIDDTLQSLYYAVDQAMHNIKRFLIQSSKSYLLNQMLPKTKEQLLAFDQQTLRNVNDFINKNQGVLGESLAKDLKKKVEKRLTSLPVFNLEDLPISEFEDLIHSHEIDIQDSEVLNIGVNNGKIQDLSGENTPLTLGENLHIINTSILNLRYESNHLIDLSRYASKINIGSKVNFDPIDKNQIQLFNLESSKIEVILKNAIVYNSMYENFSTSFWIRIPKYFNSISLNNEYTIINCMENNSGWKVSLNYGEIIWTLQDTQEIKQRVVFKYSQMINISDYINRWIFVTITNNRLNNSKIYINGRLIDQKPISNLGNIHASNNIMFKLDGCRDTHRYIWIKYFNLFDKELNEKEIKDLYDNQSNSGILKDFWGDYLQYDKPYYMLNLYDPNKYVDVNNVGIRGYMYLKGPRGSVMTTNIYLNSSLYRGTKFIIKKYASGNKDNIVRNNDRVYINVVVKNKEYRLATNASQAGVEKILSALEIPDVGNLSQVVVMKSKNDQGITNKCKMNLQDNNGNDIGFIGFHQFNNIAKLVASNWYNRQIERSSRTLGCSWEFIPVDDGWGERPLQ

SEQ ID NO: 50 - protein, 888 aa, Artificial Sequence
  Synthetic
IEILEDDLFIMSSKDSFTDTDFSEPSVGPVSYKAKKGADTILDSTLSNYDFSKEINFTSTVPIITVEDPLETDEDVPVISEDRTVYVDDYTTFHFLEAQKIGKEVVPTQTKVVFTTNMEEALFDSKKVYTVFENTASRINEAGTGIANGMMFYQWLKGIVQDFTEEATQKDTFDKISDVTMIVPYLGNILNIGNDIRKGDFMGAVELGGVTILLEAIPELTLPVLIGLTIIEDELEKEQVSQTVYNVLDKRDEKWEEVYGFVKQQWWWMVHTQFETRILHAYQALNHQVEAIKANMTYQLANYRGNQEDKELLEKAIDDTLQSLYYAVDQAMHNIKRFLIQSSKSYLLNQMLPKTKEQLLAFDQQTLRNVNDFINKNQGVLGESLAKDLKKKVEKRLTSLPVFNLEDLPISEFEDLIHSHEIDIQDSEVLNIGVNNGKIQDLSGENTPLTLGENLHILNNIILNLRYKDNNLIDLSGYGAKVEVYDGVELNDKNQFKLTSSANSKIRVTQNQNIIFNSVFLDFSVSFWIRIPKYKNDGIQNYIHNEYTIINCMKNNSGWKISIRGNRIIWTLIDINGKTKSVFFEYNIREDISEYINRWFFVTITNNLNNAKIYINGKLESNTDIKDIREVIANGEIIFKLDGDIDRTQFIWMKYFSIFNTELSQSNIEERYKIQSYSEYLKDFWGNPLMYNKEYYMFNAGNKNSYIKLKKDSPVGEILTRSKYNQNSKYINYRDLYIGEKFIIRRKSNSQSINDDIVRKEDYIYLDFFNLNQEWRVYTYKYFKKEEEKLFLAPISDSDEFYNTIQIKEYDEQPTYSCQLLFKKDEESTDEIGLIGIHRFYESGIVFEEYKDYFCISKWYLKEVKRKPYNLKLGCNWQFIPKDEGWTE

SEQ ID NO: 51 - protein, 880 aa, Artificial Sequence
  Synthetic
IEILEDDLFIMSSKDSFTDTDFSEPSVGPVSYKAKKGADTILDSTLSNYDFSKEINFTSTVPIITVEDPLETDEDVPVISEDRTVYVDDYTTFHFLEAQKIGKEVVPTQTKVVFTTNMEEALFDSKKVYTVFENTASRINEAGTGIANGMMFYQWLKGIVQDFTEEATQKDTFDKISDVTMIVPYLGNILNIGNDIRKGDFMGAVELGGVTILLEAIPELTLPVLIGLTIIEDELEKEQVSQTVYNVLDKRDEKWEEVYGFVKQQWWWMVHTQFETRILHAYQALNHQVEAIKANMTYQLANYRGNQEDKELLEKAIDDTLQSLYYAVDQAMHNIKRFLIQSSKSYLLNQMLPKTKEQLLAFDQQTLRNVNDFINKNQGVLGESLAKDLKKKVEKRLTSLPVFNLEDLPISEFEDLIHSHEIDIQDSEVLNIGVNNGKIQDLSGENTPLTLGENLHINDSKILSLQNRKNTLVDTSGYNAEVSEEGDVQLNPIFPFDFKLGSSGEDRGKVIVTQNENIVYNSMYESFSISFWIRINKWVSNLPGYTIIDSVKNNSGWSIGIISNFLVFTLKQNEDSEQSINFSYDISNNAPGYNKWFFVTVTNNMMGNMKIYINGKLIDTIKVKELTGINFSKTITFEINKIPDTGLITSDSDNINMWIRDFYIFAKELDGKDINILFNSLQYTNVVKDYWGNDLRYNKEYYMVNIDYLNRYMYANSRQIVFNTRRNNNDFNEGYKIIIKRIRGNTNDTRVRGGDILYFDMTINNKAYNLFMKNETMYADNHSTEDIYAIGLREQTKDINDNIIFQIQPMNNTYYYASQIFKSNFNGENISGICSIGTYRFRLGGDWYRHNYLVPTVKQGNYASLLESTSTHWGFVPVSE

SEQ ID NO: 52 - protein, 869 aa, Artificial Sequence
  Synthetic
IEILEDDLFIMSSKDSFTDTDFSEPSVGPVSYKAKKGADTILDSTLSNYDFSKEINFTSTVPIITVEDPLETDEDVPVISEDRTVYVDDYTTFHFLEAQKIGKEVVPTQTKVVFTTNMEEALFDSKKVYTVFENTASRINEAGTGIANGMMFYQWLKGIVQDFTEEATQKDTFDKISDVTMIVPYLGNILNIGNDIRKGDFMGAVELGGVTILLEAIPELTLPVLIGLTIIEDELEKEQVSQTVYNVLDKRDEKWEEVYGFVKQQWWWMVHTQFETRILHAYQALNHQVEAIKANMTYQLANYRGNQEDKELLEKAIDDTLQSLYYAVDQAMHNIKRFLIQSSKSYLLNQMLPKTKEQLLAFDQQTLRNVNDFINKNQGVLGESLAKDLKKKVEKRLTSLPVFNLEDLPISEFEDLIHSHEIDIQDSEVLNIGVNNGKIQDLSGENTPLTLGENLHINDSKILSLQNKKNALVDTSGYNAEVRVGDNVQLNTIYTNDFKLSSSGDKIIVNLNNNILYSAIYENSSVSFWIKISKDLTNSHNEYTIINSIEQNSGWKLCIRNGNIEWILQDVNRKYKSLIFDYSESLSHTGYTNKWFFVTITNNIMGYMKLYINGELKQSQKIEDLDEVKLDKTIVFGIDENIDENQMLWIRDFNIFSKELSNEDINIVYEGQILRNVIKDYWGNPLKFDTEYYIINDNYIDRYIAPESNVLVLVQYPDRSKLYTGNPITIKSVSDKNPYSRILNGDNIILHMLYNSRKYMIIRDTDTIYATQGGECSQNCVYALKLQSNLGNYGIGIFSIKNIVSKNKYCSQIFSSFRENTMLLADIYKPWRFSFKNAYTPVAVTNYETKLLSTSSFWKFISRDPGWVE

SEQ ID NO: 53 - protein, 862 aa, Artificial Sequence
  Synthetic
IEILEDDLFIMSSKDSFTDTDFSEPSVGPVSYKAKKGADTILDSTLSNYDFSKEINFTSTVPIITVEDPLETDEDVPVISEDRTVYVDDYTTFHFLEAQKIGKEVVPTQTKVVFTTNMEEALFDSKKVYTVFENTASRINEAGTGIANGMMFYQWLKGIVQDFTEEATQKDTFDKISDVTMIVPYLGNILNIGNDIRKGDFMGAVELGGVTILLEAIPELTLPVLIGLTIIEDELEKEQVSQTVYNVLDKRDEKWEEVYGFVKQQWWWMVHTQFETRILHAYQALNHQVEAIKANMTYQLANYRGNQEDKELLEKAIDDTLQSLYYAVDQAMHNIKRFLIQSSKSYLLNQMLPKTKEQLLAFDQQTLRNVNDFINKNQGVLGESLAKDLKKKVEKRLTSLPVFNLEDLPISEFEDLIHSHEIDIQDSEVLNIGVNNGKIQDLSGENTPLTLGENLHIKSSSVLNMRYKNDKYVDTSGYDSNININGDVYKYPTNKNQFGIYNDKLSEVNISQNDYIIYDNKYKNFSISFWVRIPNYDNKIVNVNNEYTIINCMRDNNSGWKVSLNHNEIIWTLQDNAGINQKLAFNYGNANGISDYINKWIFVTITNDRLGDSKLYINGNLIDQKSILNLGNIHVSDNILFKIVNCSYTRYIGIRYFNIFDKELDETEIQTLYSNEPNTNILKDFWGNYLLYDKEYYLLNVLKPNNFIDRRKDSTLSINNIRSTILLANRLYSGIKVKIQRVNNSSTNDNLVRKNDQVYINFVASKTHLFPLYADTATTNKEKTIKISSSGNRFNQVVVMNSVGNNCTMNFKNNNGNNIGLLGFKADTVVASTWYYTHMRDHTNSNGCFWNFISEEHGWQEK

SEQ ID NO: 54 - protein, 869 aa, Artificial Sequence
  Synthetic
IEILEDDLFIMSSKDSFTDTDFSEPSVGPVSYKAKKGADTILDSTLSNYDFSKEINFTSTVPIITVEDPLETDEDVPVISEDRTVYVDDYTTFHFLEAQKIGKEVVPTQTKVVFTTNMEEALFDSKKVYTVFENTASRINEAGTGIANGMMFYQWLKGIVQDFTEEATQKDTFDKISDVTMIVPYLGNILNIGNDIRKGDFMGAVELGGVTILLEAIPELTLPVLIGLTIIEDELEKEQVSQTVYNVLDKRDEKWEEVYGFVKQQWWWMVHTQFETRILHAYQALNHQVEAIKANMTYQLANYRGNQEDKELLEKAIDDTLQSLYYAVDQAMHNIKRFLIQSSKSYLLNQMLPKTKEQLLAFDQQTLRNVNDFINKNQGVLGESLAKDLKKKVEKRLTSLPVFNLEDLPISEFEDLIHSHEIDIQDSEVLNIGVNNGKIQDLSGENTPLTLGENLHIKDNSILDMRYENNKFIDISGYGSNISINGDVYIYSTNRNQFGIYSSKPSEVNIAQNNDIIYNGRYQNFSISFWVRIPKYFNKVNLNNEYTIIDCIRNNNSGWKISLNYNKIIWTLQDTAGNNQKLVFNYTQMISISDYINKWIFVTITNNRLGNSRIYINGNLIDEKSISNLGDIHVSDNILFKIVGCNDTRYVGIRYFKVFDTELGKTEIETLYSDEPDPSILKDFWGNYLLYNKRYYLLNLLRTDKSITQNSNFLNINQQRGVYQKPNIFSNTRLYTGVEVIIRKNGSTDISNTDNFVRKNDLAYINVVDRDVEYRLYADISIAKPEKIIKLIRTSNSNNSLGQIIVMDSIGNNCTMNFQNNNGGNIGLLGFHSNNLVASSWYYNNIRKNTSSNGCFWSFISKEHGWQEN

SEQ ID NO: 55 - protein, 889 aa, Artificial Sequence
  Synthetic
IEILEDDLFIMSSKDSFTDTDFSEPSVGPVSYKAKKGADTILDSTLSNYDFSKEINFTSTVPIITVEDPLETDEDVPVISEDRTVYVDDYTTFHFLEAQKIGKEVVPTQTKVVFTTNMEEALFDSKKVYTVFENTASRINEAGTGIANGMMFYQWLKGIVQDFTEEATQKDTFDKISDVTMIVPYLGNILNIGNDIRKGDFMGAVELGGVTILLEAIPELTLPVLIGLTIIEDELEKEQVSQTVYNVLDKRDEKWEEVYGFVKQQWWWMVHTQFETRILHAYQALNHQVEAIKANMTYQLANYRGNQEDKELLEKAIDDTLQSLYYAVDQAMHNIKRFLIQSSKSYLLNQMLPKTKEQLLAFDQQTLRNVNDFINKNQGVLGESLAKDLKKKVEKRLTSLPVFNLEDLPISEFEDLIHSHEIDIQDSEVLNIGVNNGKIQDLSGENTPLTLGENLHISSNAILSLSYRGGRLIDSSGYGATMNVGSDVIFNDIGNGQFKLNNSENSNITAHQSKFVVYDSMFDNFSINFWVRTPKYNNNDIQTYLQNEYTIISCIKNDSGWKVSIKGNRIIWTLIDVNAKSKSIFFEYSIKDNISDYINKWFSITITNDRLGNANIYINGSLKKSEKILNLDRINSSNDIDFKLINCTDTTKFVWIKDFNIFGRELNATEVSSLYWIQSSTNTLKDFWGNPLRYDTQYYLFNQGMQNIYIKYFSKASMGETAPRTNFNNAAINYQNLYLGLRFIIKKASNSRNINNDNIVREGDYIYLNIDNISDESYRVYVLVNSKEIQTQLFLAPINDDPTFYDVLQIKKYYEKTTYNCQILCEKDTKTFGLFGIGKFVKDYGYVWDTYDNYFCISQWYLRRISENINKLRLGCNWQFIPVDEGWTE

SEQ ID NO: 56 - protein, 884 aa, Artificial Sequence
  Synthetic
IEILEDDLFIMSSKDSFTDTDFSEPSVGPVSYKAKKGADTILDSTLSNYDFSKEINFTSTVPIITVEDPLETDEDVPVISEDRTVYVDDYTTFHFLEAQKIGKEVVPTQTKVVFTTNMEEALFDSKKVYTVFENTASRINEAGTGIANGMMFYQWLKGIVQDFTEEATQKDTFDKISDVTMIVPYLGNILNIGNDIRKGDFMGAVELGGVTILLEAIPELTLPVLIGLTIIEDELEKEQVSQTVYNVLDKRDEKWEEVYGFVKQQWWWMVHTQFETRILHAYQALNHQVEAIKANMTYQLANYRGNQEDKELLEKAIDDTLQSLYYAVDQAMHNIKRFLIQSSKSYLLNQMLPKTKEQLLAFDQQTLRNVNDFINKNQGVLGESLAKDLKKKVEKRLTSLPVFNLEDLPISEFEDLIHSHEIDIQDSEVLNIGVNNGKIQDLSGENTPLTLGENLHLKYNCILNIKYEMDRDKLVDSSGYRSRINIGTGVKFSEIDKNQVQLSNLESSKIEVILNNGVIYNSMYENFSTSFWIRIPKYFRNINNEYKIISCMQNNSGWEVSLNFSNMNSKIIWTLQDTEGIKKTVVFQYTQNINISDYINRWIFVTITNNRLSNSKIYINGRLINEESISDLGNIHASNNIMFKLDGCRDPHRYIWIKYFNLFDKELNKKEIKDLYDNQSNSGILKDFWGDYLQYDKPYYMLNLYDPNKYLDVNNVGIRGYMYLKGPRGRIVTTNIYLNSTLYMGTKFIIKKYASGNKDNIVRNNDRVYINVVVKNKEYRLATNASQAGVEKILSAVEIPDVGNLSQVVVMKSENDQGIRNKCKMNLQDNNGNDIGFIGFHQFNNIAKLVASNWYNRQIGKASRTFGCSWEFIPVDDGWGESSL

SEQ ID NO: 57 - protein, 132 aa, Artificial Sequence
  Synthetic
MGTQVQLVESGGGLVQPGGSLRLSCAASGSIFSIYAMGWYRQAPGKQRELVAAISSYGSTNYADSVKGRFTISRDNAKNTVYLQMNSLKPEDTAVYYCNADIATMTAVGGFDYWGQGTQVTVSSEPKTPKPQ

SEQ ID NO: 58 - protein, 130 aa, Artificial Sequence
  Synthetic
HVQLQQSGGGLVQPGGSLRLSCAASGSIFSIYAMGWYRQAPGKQRELVAAISSYGSTNYADSVKGRFTISRDNAKNTVYLQMNSLKPEDTAVYYCNADIATMTAVGGFDYWGQGTQVTVSSEPKTPKPQP

SEQ ID NO: 59 - protein, 255 aa, Artificial Sequence
  Synthetic
MSDKIIHLTDDSFDTDVLKADGAILVDFWAEWCGPCKMIAPILDEIADEYQGKLTVAKLNIDQNPGTAPKYGIRGIPTLLLFKNGEVAATKVGALSKGQLKEFLDANLAGGSLVPRGSGGSEFMGTQVQLVESGGGLVQPGGSLRLSCAASGSIFSIYAMGWYRQAPGKQRELVAAISSYGSTNYADSVKGRFTISRDNAKNTVYLQMNSLKPEDTAVYYCNADIATMTAVGGFDYWGQGTQVTVSSEPKTPKPQ

SEQ ID NO: 60 - protein, 253 aa, Artificial Sequence
  Synthetic
MSDKIIHLTDDSFDTDVLKADGAILVDFWAEWCGPCKMIAPILDEIADEYQGKLTVAKLNIDQNPGTAPKYGIRGIPTLLLFKNGEVAATKVGALSKGQLKEFLDANLAGGSLVPRGSGGSEFHVQLQQSGGGLVQPGGSLRLSCAASGSIFSIYAMGWYRQAPGKQRELVAAISSYGSTNYADSVKGRFTISRDNAKNTVYLQMNSLKPEDTAVYYCNADIATMTAVGGFDYWGQGTQVTVSSEPKTPKPQP

SEQ ID NO: 61 - protein, 689 aa, Artificial Sequence
  Synthetic
MSDKIIHLTDDSFDTDVLKADGAILVDFWAEWCGPCKMIAPILDEIADEYQGKLTVAKLNIDQNPGTAPKYGIRGIPTLLLFKNGEVAATKVGALSKGQLKEFLDANLAGGSLVPRGSGGSEFMGTQVQLVESGGGLVQPGGSLRLSCAASGSIFSIYAMGWYRQAPGKQRELVAAISSYGSTNYADSVKGRFTISRDNAKNTVYLQMNSLKPEDTAVYYCNADIATMTAVGGFDYWGQGTQVTVSSEPKTPKPQGGGGSGGGGSKLMKLEINKFNYNDPIDGINVITMRPPRHSDKINKGKGPFKAFQVIKNIWIVPERYNFTNNTNDLNIPSEPIMEADAIYNPNYLNTPSEKDEFLQGVIKVLERIKSKPEGEKLLELISSSIPLPLVSNGALTLSDNETIAYQENNNIVSNLQANLVIYGPGPDIANNATYGLYSTPISNGEGTLSEVSFSPFYLKPFDESYGNYRSLVNIVNKFVKREFAPDPASTLMHQLVHVTHNLYGISNRNFYYNFDTGKIETSRQQNSLIFEELLTFGGIDSKAISSLIIKKIIETAKNNYTTLISERLNTVTVENDLLKYIKNKIPVQGRLGNFKLDTAEFEKKLNTILFVLNESNLAQRFSILVAKHFLKERPIDPIYVNILDDNSYSTLEGFNISSQGSNDFQGQLLESSYFEKIESNALRAFIKI

SEQ ID NO: 62 - protein, 687 aa, Artificial Sequence
  Synthetic
MSDKIIHLTDDSFDTDVLKADGAILVDFWAEWCGPCKMIAPILDEIADEYQGKLTVAKLNIDQNPGTAPKYGIRGIPTLLLFKNGEVAATKVGALSKGQLKEFLDANLAGGSLVPRGSGGSEFHVQLQQSGGGLVQPGGSLRLSCAASGSIFSIYAMGWYRQAPGKQRELVAAISSYGSTNYADSVKGRFTISRDNAKNTVYLQMNSLKPEDTAVYYCNADIATMTAVGGFDYWGQGTQVTVSSEPKTPKPQPGGGGSGGGGSKLMKLEINKFNYNDPIDGINVITMRPPRHSDKINKGKGPFKAFQVIKNIWIVPERYNFTNNTNDLNIPSEPIMEADAIYNPNYLNTPSEKDEFLQGVIKVLERIKSKPEGEKLLELISSSIPLPLVSNGALTLSDNETIAYQENNNIVSNLQANLVIYGPGPDIANNATYGLYSTPISNGEGTLSEVSFSPFYLKPFDESYGNYRSLVNIVNKFVKREFAPDPASTLMHQLVHVTHNLYGISNRNFYYNFDTGKIETSRQQNSLIFEELLTFGGIDSKAISSLIIKKIIETAKNNYTTLISERLNTVTVENDLLKYIKNKIPVQGRLGNFKLDTAEFEKKLNTILFVLNESNLAQRFSILVAKHFLKERPIDPIYVNILDDNSYSTLEGFNISSQGSNDFQGQLLESSYFEKIESNALRAFIKI

SEQ ID NO: 63 - protein, 690 aa, Artificial Sequence
  Synthetic
MSDKIIHLTDDSFDTDVLKADGAILVDFWAEWCGPCKMIAPILDEIADEYQGKLTVAKLNIDQNPGTAPKYGIRGIPTLLLFKNGEVAATKVGALSKGQLKEFLDANLAGGSLVPRGSGGSEFMGTQVQLVESGGGLVQPGGSLRLSCAASGSIFSIYAMGWYRQAPGKQRELVAAISSYGSTNYADSVKGRFTISRDNAKNTVYLQMNSLKPEDTAVYYCNADIATMTAVGGFDYWGQGTQVTVSSEPKTPKPQGGGGSGGGGSKLMVTINDLHYSDPIDEDNIINMRIPLYDLEVDDQFINHNVPDLKAFQVFPNVWVVPERYTFYSTMKNLDAPANPSRSSYYDPTYLQSDAEKEVFLQQMILLFKRINSTQEGQQFLNLLSRSIPVPYESNGDVAMGTTQVIKQMDDKGNVLKHRRAHIIIYGPGPDLMAKGSKALTKSRETGRGCMAEIYFSPMYHKTYSTKLTNKNSLVDKSVQEFVPDPAVTLIHQLCHGLHALYGIDLGNVGSWEFNSNPNSLFSSWFSSKEAVNFEEVMTFGGEDVKVIKSEIDKKIPGILNLIKTTVEPIINKITDPHDEMLQCLQSKYPSLKGTLGQFFFDDTQLEKDIRDLWMVMNETMFAENLKALTAARFLVPKVENIVQVDILSPNVYTIDKGFNHLSKGFKGQSVSQSYFRKISALARGAVVRA

SEQ ID NO: 64 - protein, 676 aa, Artificial Sequence
  Synthetic
MSDKIIHLTDDSFDTDVLKADGAILVDFWAEWCGPCKMIAPILDEIADEYQGKLTVAKLNIDQNPGTAPKYGIRGIPTLLLFKNGEVAATKVGALSKGQLKEFLDANLAGGSLVPRGSGGSEFHVQLQQSGGGLVQPGGSLRLSCAASGSIFSIYAMGWYRQAPGKQRELVAAISSYGSTNYADSVKGRFTISRDNAKNTVYLQMNSLKPEDTAVYYCNADIATMTAVGGFDYWGQGTQVTVSSEPKTPKPQPMVTINDLHYSDPIDEDNIINMRIPLYDLEVDDQFINHNVPDLKAFQVFPNVWVVPERYTFYSTMKNLDAPANPSRSSYYDPTYLQSDAEKEVFLQQMILLFKRINSTQEGQQFLNLLSRSIPVPYESNGDVAMGTTQVIKQMDDKGNVLKHRRAHIIIYGPGPDLMAKGSKALTKSRETGRGCMAEIYFSPMYHKTYSTKLTNKNSLVDKSVQEFVPDPAVTLIHQLCHGLHALYGIDLGNVGSWEFNSNPNSLFSSWFSSKEAVNFEEVMTFGGEDVKVIKSEIDKKIPGILNLIKTTVEPIINKITDPHDEMLQCLQSKYPSLKGTLGQFFFDDTQLEKDIRDLWMVMNETMFAENLKALTAARFLVPKVENIVQVDILSPNVYTIDKGFNHLSKGFKGQSVSQSYFRKISALARGAVVRA

SEQ ID NO: 65 - protein, 1621 aa, Artificial Sequence
  Synthetic
MSDKIIHLTDDSFDTDVLKADGAILVDFWAEWCGPCKMIAPILDEIADEYQGKLTVAKLNIDQNPGTAPKYGIRGIPTLLLFKNGEVAATKVGALSKGQLKEFLDANLAGGSLVPRGSGGSEFMGTQVQLVESGGGLVQPGGSLRLSCAASGSIFSIYAMGWYRQAPGKQRELVAAISSYGSTNYADSVKGRFTISRDNAKNTVYLQMNSLKPEDTAVYYCNADIATMTAVGGFDYWGQGTQVTVSSEPKTPKPQGGGGSGGGGSKLMKLEINKFNYNDPIDGINVITMRPPRHSDKINKGKGPFKAFQVIKNIWIVPERYNFTNNTNDLNIPSEPIMEADAIYNPNYLNTPSEKDEFLQGVIKVLERIKSKPEGEKLLELISSSIPLPLVSNGALTLSDNETIAYQENNNIVSNLQANLVIYGPGPDIANNATYGLYSTPISNGEGTLSEVSFSPFYLKPFDESYGNYRSLVNIVNKFVKREFAPDPASTLMHQLVHVTHNLYGISNRNFYYNFDTGKIETSRQQNSLIFEELLTFGGIDSKAISSLIIKKIIETAKNNYTTLISERLNTVTVENDLLKYIKNKIPVQGRLGNFKLDTAEFEKKLNTILFVLNESNLAQRFSILVAKHFLKERPIDPIYVNILDDNSYSTLEGFNISSQGSNDFQGQLLESSYFEKIESNALRAFIKICHKAIDGRSLGGSLVPRGSGGSAAAYNKTLDCIEVENKDLFLISNKDSLNDINLSEEKIKPETTVFFKDKLPPQDITLSNYDFTEANSIPSISQQNILERNEELYEPIRNSLFEIKTIYVDKLTTFHFLEAQNIDESIDSSKIRVELTDSVDEALSNPNKVYSPFKNMSNTINSIETGITSTYIFYQWLRSIVKDFSDETGKIDVIDKSSDTLAIVPYIGPLLNIGNDIRHGDFVGAIELAGITALLEYVPEFTIPILVGLEVIGGELAREQVEAIVNNALDKRDQKWAEVYNITKAQWWGTIHLQINTRLAHTYKALSRQANAIKMNMEFQLANYKGNIDDKAKIKNAISETEILLNKSVEQAMKNTEKFMIKLSNSYLTKEMIPKVQDNLKNFDLETKKTLDKFIKEKEDILGTNLSSSLRRKVSIRLNKNIAFDINDIPFSEFDDLINQYKNEIEDYEVLNLGAEDGKIKDLSGTTSDINIGSDIEIINTSILNLRYESNHLIDLSRYASKINIGSKVNFDPIDKNQIQLFNLESSKIEVILKNAIVYNSMYENFSTSFWIRIPKYFNSISLNNEYTIINCMENNSGWKVSLNYGEIIWTLQDTQEIKQRVVFKYSQMINISDYINRWIFVTITNNRLNNSKIYINGRLIDQKPISNLGNIHASNNIMFKLDGCRDTHRYIWIKYFNLFDKELNEKEIKDLYDNQSNSGILKDFWGDYLQYDKPYYMLNLYDPNKYVDVNNVGIRGYMYLKGPRGSVMTTNIYLNSSLYRGTKFIIKKYASGNKDNIVRNNDRVYINVVVKNKEYRLATNASQAGVEKILSALEIPDVGNLSQVVVMKSKNDQGITNKCKMNLQDNNGNDIGFIGFHQFNNIAKLVASNWYNRQIERSSRTLGCSWEFIPVDDGWGERPLQGSLVPRGSGSLEHHHHHH

SEQ ID NO: 66 - protein, 1620 aa, Artificial Sequence
  Synthetic
MSDKIIHLTDDSFDTDVLKADGAILVDFWAEWCGPCKMIAPILDEIADEYQGKLTVAKLNIDQNPGTAPKYGIRGIPTLLLFKNGEVAATKVGALSKGQLKEFLDANLAGGSLVPRGSGGSEFMGTQVQLVESGGGLVQPGGSLRLSCAASGSIFSIYAMGWYRQAPGKQRELVAAISSYGSTNYADSVKGRFTISRDNAKNTVYLQMNSLKPEDTAVYYCNADIATMTAVGGFDYWGQGTQVTVSSEPKTPKPQGGGGSGGGGSKMVTINDLHYSDPIDEDNIINMRIPLYDLEVDDQFINHNVPDLKAFQVFPNVWVVPERYTFYSTMKNLDAPANPSRSSYYDPTYLQSDAEKEVFLQQMILLFKRINSTQEGQQFLNLLSRSIPVPYESNGDVAMGTTQVIKQMDDKGNVLKHRRAHIIIYGPGPDLMAKGSKALTKSRETGRGCMAEIYFSPMYHKTYSTKLTNKNSLVDKSVQEFVPDPAVTLIHQLCHGLHALYGIDLGNVGSWEFNSNPNSLFSSWFSSKEAVNFEEVMTFGGEDVKVIKSEIDKKIPGILNLIKTTVEPIINKITDPHDEMLQCLQSKYPSLKGTLGQFFFDDTQLEKDIRDLWMVMNETMFAENLKALTRARYLVPKVENIVQVDILSPNVYTIDKGFNHLSKGFKGQSVSQSYFRKISALARGAVVRACHKAIDGRSLGGSLVPRGSGGSAAAYNKTLDCIEILEDDLFIMSSKDSFTDTDFSEPSVGPVSYKAKKGADTILDSTLSNYDFSKEINFTSTVPIITVEDPLETDEDVPVISEDRTVYVDDYTTFHFLEAQKIGKEVVPTQTKVVFTTNMEEALFDSKKVYTVFENTASRINEAGTGIANGMMFYQWLKGIVQDFTEEATQKDTFDKISDVTMIVPYLGNILNIGNDIRKGDFMGAVELGGVTILLEAIPELTLPVLIGLTIIEDELEKEQVSQTVYNVLDKRDEKWEEVYGFVKQQWWWMVHTQFETRILHAYQALNHQVEAIKANMTYQLANYRGNQEDKELLEKAIDDTLQSLYYAVDQAMHNIKRFLIQSSKSYLLNQMLPKTKEQLLAFDQQTLRNVNDFINKNQGVLGESLAKDLKKKVEKRLTSLPVFNLEDLPISEFEDLIHSHEIDIQDSEVLNIGVNNGKIQDLSGENTPLTLGENLHIINTSILNLRYESNHLIDLSRYASKINIGSKVNFDPIDKNQIQLFNLESSKIEVILKNAIVYNSMYENFSTSFWIRIPKYFNSISLNNEYTIINCMENNSGWKVSLNYGEIIWTLQDTQEIKQRVVFKYSQMINISDYINRWIFVTITNNRLNNSKIYINGRLIDQKPISNLGNIHASNNIMFKLDGCRDTHRYIWIKYFNLFDKELNEKEIKDLYDNQSNSGILKDFWGDYLQYDKPYYMLNLYDPNKYVDVNNVGIRGYMYLKGPRGSVMTTNIYLNSSLYRGTKFIIKKYASGNKDNIVRNNDRVYINVVVKNKEYRLATNASQAGVEKILSALEIPDVGNLSQVVVMKSKNDQGITNKCKMNLQDNNGNDIGFIGFHQFNNIAKLVASNWYNRQIERSSRTLGCSWEFIPVDDGWGERPLQGSLVPRGSGSLEHHHHHH

SEQ ID NO: 67 - protein, 126 aa, Artificial Sequence
  Synthetic
QVQLVESGGGLVQPGGSLRLSCAASGFPFHAYYMSWVRQAPGKGLEWVSHIGNGGIITRYADSVKGRFTISRDNAKNTLYLQMTNLKPEDTALYYCTLGTRDDLGPERGQGTQVTVSSEPKTPKPQ

SEQ ID NO: 68 - protein, 249 aa, Artificial Sequence
  Synthetic
MSDKIIHLTDDSFDTDVLKADGAILVDFWAEWCGPCKMIAPILDEIADEYQGKLTVAKLNIDQNPGTAPKYGIRGIPTLLLFKNGEVAATKVGALSKGQLKEFLDANLAGGSLVPRGSGGSEFQVQLVESGGGLVQPGGSLRLSCAASGFPFHAYYMSWVRQAPGKGLEWVSHIGNGGIITRYADSVKGRFTISRDNAKNTLYLQMTNLKPEDTALYYCTLGTRDDLGPERGQGTQVTVSSEPKTPKPQ

SEQ ID NO: 69 - protein, 683 aa, Artificial Sequence
  Synthetic
MSDKIIHLTDDSFDTDVLKADGAILVDFWAEWCGPCKMIAPILDEIADEYQGKLTVAKLNIDQNPGTAPKYGIRGIPTLLLFKNGEVAATKVGALSKGQLKEFLDANLAGGSLVPRGSGGSEFQVQLVESGGGLVQPGGSLRLSCAASGFPFHAYYMSWVRQAPGKGLEWVSHIGNGGIITRYADSVKGRFTISRDNAKNTLYLQMTNLKPEDTALYYCTLGTRDDLGPERGQGTQVTVSSEPKTPKPQGGGGSGGGGSKLMKLEINKFNYNDPIDGINVITMRPPRHSDKINKGKGPFKAFQVIKNIWIVPERYNFTNNTNDLNIPSEPIMEADAIYNPNYLNTPSEKDEFLQGVIKVLERIKSKPEGEKLLELISSSIPLPLVSNGALTLSDNETIAYQENNNIVSNLQANLVIYGPGPDIANNATYGLYSTPISNGEGTLSEVSFSPFYLKPFDESYGNYRSLVNIVNKFVKREFAPDPASTLMHQLVHVTHNLYGISNRNFYYNFDTGKIETSRQQNSLIFEELLTFGGIDSKAISSLIIKKIIETAKNNYTTLISERLNTVTVENDLLKYIKNKIPVQGRLGNFKLDTAEFEKKLNTILFVLNESNLAQRFSILVAKHFLKERPIDPIYVNILDDNSYSTLEGFNISSQGSNDFQGQLLESSYFEKIESNALRAFIKI

SEQ ID NO: 70 - protein, 684 aa, Artificial Sequence
  Synthetic
MSDKIIHLTDDSFDTDVLKADGAILVDFWAEWCGPCKMIAPILDEIADEYQGKLTVAKLNIDQNPGTAPKYGIRGIPTLLLFKNGEVAATKVGALSKGQLKEFLDANLAGGSLVPRGSGGSEFQVQLVESGGGLVQPGGSLRLSCAASGFPFHAYYMSWVRQAPGKGLEWVSHIGNGGIITRYADSVKGRFTISRDNAKNTLYLQMTNLKPEDTALYYCTLGTRDDLGPERGQGTQVTVSSEPKTPKPQGGGGSGGGGSKLMVTINDLHYSDPIDEDNIINMRIPLYDLEVDDQFINHNVPDLKAFQVFPNVWVVPERYTFYSTMKNLDAPANPSRSSYYDPTYLQSDAEKEVFLQQMILLFKRINSTQEGQQFLNLLSRSIPVPYESNGDVAMGTTQVIKQMDDKGNVLKHRRAHIIIYGPGPDLMAKGSKALTKSRETGRGCMAEIYFSPMYHKTYSTKLTNKNSLVDKSVQEFVPDPAVTLIHQLCHGLHALYGIDLGNVGSWEFNSNPNSLFSSWFSSKEAVNFEEVMTFGGEDVKVIKSEIDKKIPGILNLIKTTVEPIINKITDPHDEMLQCLQSKYPSLKGTLGQFFFDDTQLEKDIRDLWMVMNETMFAENLKALTAARFLVPKVENIVQVDILSPNVYTIDKGFNHLSKGFKGQSVSQSYFRKISALARGAVVRA

SEQ ID NO: 71 - protein, 1615 aa, Artificial Sequence
  Synthetic
MSDKIIHLTDDSFDTDVLKADGAILVDFWAEWCGPCKMIAPILDEIADEYQGKLTVAKLNIDQNPGTAPKYGIRGIPTLLLFKNGEVAATKVGALSKGQLKEFLDANLAGGSLVPRGSGGSEFQVQLVESGGGLVQPGGSLRLSCAASGFPFHAYYMSWVRQAPGKGLEWVSHIGNGGIITRYADSVKGRFTISRDNAKNTLYLQMTNLKPEDTALYYCTLGTRDDLGPERGQGTQVTVSSEPKTPKPQGGGGSGGGGSKLMKLEINKFNYNDPIDGINVITMRPPRHSDKINKGKGPFKAFQVIKNIWIVPERYNFTNNTNDLNIPSEPIMEADAIYNPNYLNTPSEKDEFLQGVIKVLERIKSKPEGEKLLELISSSIPLPLVSNGALTLSDNETIAYQENNNIVSNLQANLVIYGPGPDIANNATYGLYSTPISNGEGTLSEVSFSPFYLKPFDESYGNYRSLVNIVNKFVKREFAPDPASTLMHQLVHVTHNLYGISNRNFYYNFDTGKIETSRQQNSLIFEELLTFGGIDSKAISSLIIKKIIETAKNNYTTLISERLNTVTVENDLLKYIKNKIPVQGRLGNFKLDTAEFEKKLNTILFVLNESNLAQRFSILVAKHFLKERPIDPIYVNILDDNSYSTLEGFNISSQGSNDFQGQLLESSYFEKIESNALRAFIKICHKAIDGRSLGGSLVPRGSGGSAAAYNKTLDCIEVENKDLFLISNKDSLNDINLSEEKIKPETTVFFKDKLPPQDITLSNYDFTEANSIPSISQQNILERNEELYEPIRNSLFEIKTIYVDKLTTFHFLEAQNIDESIDSSKIRVELTDSVDEALSNPNKVYSPFKNMSNTINSIETGITSTYIFYQWLRSIVKDFSDETGKIDVIDKSSDTLAIVPYIGPLLNIGNDIRHGDFVGAIELAGITALLEYVPEFTIPILVGLEVIGGELAREQVEAIVNNALDKRDQKWAEVYNITKAQWWGTIHLQINTRLAHTYKALSRQANAIKMNMEFQLANYKGNIDDKAKIKNAISETEILLNKSVEQAMKNTEKFMIKLSNSYLTKEMIPKVQDNLKNFDLETKKTLDKFIKEKEDILGTNLSSSLRRKVSIRLNKNIAFDINDIPFSEFDDLINQYKNEIEDYEVLNLGAEDGKIKDLSGTTSDINIGSDIEIINTSILNLRYESNHLIDLSRYASKINIGSKVNFDPIDKNQIQLFNLESSKIEVILKNAIVYNSMYENFSTSFWIRIPKYFNSISLNNEYTIINCMENNSGWKVSLNYGEIIWTLQDTQEIKQRVVFKYSQMINISDYINRWIFVTITNNRLNNSKIYINGRLIDQKPISNLGNIHASNNIMFKLDGCRDTHRYIWIKYFNLFDKELNEKEIKDLYDNQSNSGILKDFWGDYLQYDKPYYMLNLYDPNKYVDVNNVGIRGYMYLKGPRGSVMTTNIYLNSSLYRGTKFIIKKYASGNKDNIVRNNDRVYINVVVKNKEYRLATNASQAGVEKILSALEIPDVGNLSQVVVMKSKNDQGITNKCKMNLQDNNGNDIGFIGFHQFNNIAKLVASNWYNRQIERSSRTLGCSWEFIPVDDGWGERPLQGSLVPRGSGSLEHHHHHH

SEQ ID NO: 72 - protein, 1615 aa, Artificial Sequence
  Synthetic
MSDKIIHLTDDSFDTDVLKADGAILVDFWAEWCGPCKMIAPILDEIADEYQGKLTVAKLNIDQNPGTAPKYGIRGIPTLLLFKNGEVAATKVGALSKGQLKEFLDANLAGGSLVPRGSGGSEFQVQLVESGGGLVQPGGSLRLSCAASGFPFHAYYMSWVRQAPGKGLEWVSHIGNGGIITRYADSVKGRFTISRDNAKNTLYLQMTNLKPEDTALYYCTLGTRDDLGPERGQGTQVTVSSEPKTPKPQGGGGSGGGGSASMVTINDLHYSDPIDEDNIINMRIPLYDLEVDDQFINHNVPDLKAFQVFPNVWVVPERYTFYSTMKNLDAPANPSRSSYYDPTYLQSDAEKEVFLQQMILLFKRINSTQEGQQFLNLLSRSIPVPYESNGDVAMGTTQVIKQMDDKGNVLKHRRAHIIIYGPGPDLMAKGSKALTKSRETGRGCMAEIYFSPMYHKTYSTKLTNKNSLVDKSVQEFVPDPAVTLIHQLCHGLHALYGIDLGNVGSWEFNSNPNSLFSSWFSSKEAVNFEEVMTFGGEDVKVIKSEIDKKIPGILNLIKTTVEPIINKITDPHDEMLQCLQSKYPSLKGTLGQFFFDDTQLEKDIRDLWMVMNETMFAENLKALTAARFLVPKVENIVQVDILSPNVYTIDKGFNHLSKGFKGQSVSQSYFRKISALARGAVVRACHKAIDGRSLGGSLVPRGSGGSAAAYNKTLDCIEILEDDLFIMSSKDSFTDTDFSEPSVGPVSYKAKKGADTILDSTLSNYDFSKEINFTSTVPIITVEDPLETDEDVPVISEDRTVYVDDYTTFHFLEAQKIGKEVVPTQTKVVFTTNMEEALFDSKKVYTVFENTASRINEAGTGIANGMMFYQWLKGIVQDFTEEATQKDTFDKISDVTMIVPYLGNILNIGNDIRKGDFMGAVELGGVTILLEAIPELTLPVLIGLTIIEDELEKEQVSQTVYNVLDKRDEKWEEVYGFVKQQWWWMVHTQFETRILHAYQALNHQVEAIKANMTYQLANYRGNQEDKELLEKAIDDTLQSLYYAVDQAMHNIKRFLIQSSKSYLLNQMLPKTKEQLLAFDQQTLRNVNDFINKNQGVLGESLAKDLKKKVEKRLTSLPVFNLEDLPISEFEDLIHSHEIDIQDSEVLNIGVNNGKIQDLSGENTPLTLGENLHIINTSILNLRYESNHLIDLSRYASKINIGSKVNFDPIDKNQIQLFNLESSKIEVILKNAIVYNSMYENFSTSFWIRIPKYFNSISLNNEYTIINCMENNSGWKVSLNYGEIIWTLQDTQEIKQRVVFKYSQMINISDYINRWIFVTITNNRLNNSKIYINGRLIDQKPISNLGNIHASNNIMFKLDGCRDTHRYIWIKYFNLFDKELNEKEIKDLYDNQSNSGILKDFWGDYLQYDKPYYMLNLYDPNKYVDVNNVGIRGYMYLKGPRGSVMTTNIYLNSSLYRGTKFIIKKYASGNKDNIVRNNDRVYINVVVKNKEYRLATNASQAGVEKILSALEIPDVGNLSQVVVMKSKNDQGITNKCKMNLQDNNGNDIGFIGFHQFNNIAKLVASNWYNRQIERSSRTLGCSWEFIPVDDGWGERPLQGSLVPRGSGSLEHHHHHH

SEQ ID NO: 73 - protein, 827 aa, Artificial Sequence
  Synthetic
MSDKIIHLTDDSFDTDVLKADGAILVDFWAEWCGPCKMIAPILDEIADEYQGKLTVAKLNIDQNPGTAPKYGIRGIPTLLLFKNGEVAATKVGALSKGQLKEFLDANLAGGSLVPRGSGGSEFMGTQVQLVESGGGLVQPGGSLRLSCAASGSIFSIYAMGWYRQAPGKQRELVAAISSYGSTNYADSVKGRFTISRDNAKNTVYLQMNSLKPEDTAVYYCNADIATMTAVGGFDYWGQGTQVTVSSEPKTPKPQGGGGSGGGGSASQVQLVESGGGLVQPGGSLRLSCAASGFPFHAYYMSWVRQAPGKGLEWVSHIGNGGIITRYADSVKGRFTISRDNAKNTLYLQMTNLKPEDTALYYCTLGTRDDLGPERGQGTQVTVSSEPKTPKPQGGGGSGGGGSKLMKLEINKFNYNDPIDGINVITMRPPRHSDKINKGKGPFKAFQVIKNIWIVPERYNFTNNTNDLNIPSEPIMEADAIYNPNYLNTPSEKDEFLQGVIKVLERIKSKPEGEKLLELISSSIPLPLVSNGALTLSDNETIAYQENNNIVSNLQANLVIYGPGPDIANNATYGLYSTPISNGEGTLSEVSFSPFYLKPFDESYGNYRSLVNIVNKFVKREFAPDPASTLMHQLVHVTHNLYGISNRNFYYNFDTGKIETSRQQNSLIFEELLTFGGIDSKAISSLIIKKIIETAKNNYTTLISERLNTVTVENDLLKYIKNKIPVQGRLGNFKLDTAEFEKKLNTILFVLNESNLAQRFSILVAKHFLKERPIDPIYVNILDDNSYSTLEGFNISSQGSNDFQGQLLESSYFEKIESNALRAFIKI

SEQ ID NO: 74 - protein, 828 aa, Artificial Sequence
  Synthetic
MSDKIIHLTDDSFDTDVLKADGAILVDFWAEWCGPCKMIAPILDEIADEYQGKLTVAKLNIDQNPGTAPKYGIRGIPTLLLFKNGEVAATKVGALSKGQLKEFLDANLAGGSLVPRGSGGSEFMGTQVQLVESGGGLVQPGGSLRLSCAASGSIFSIYAMGWYRQAPGKQRELVAAISSYGSTNYADSVKGRFTISRDNAKNTVYLQMNSLKPEDTAVYYCNADIATMTAVGGFDYWGQGTQVTVSSEPKTPKPQGGGGSGGGGSASQVQLVESGGGLVQPGGSLRLSCAASGFPFHAYYMSWVRQAPGKGLEWVSHIGNGGIITRYADSVKGRFTISRDNAKNTLYLQMTNLKPEDTALYYCTLGTRDDLGPERGQGTQVTVSSEPKTPKPQGGGGSGGGGSKLMVTINDLHYSDPIDEDNIINMRIPLYDLEVDDQFINHNVPDLKAFQVFPNVWVVPERYTFYSTMKNLDAPANPSRSSYYDPTYLQSDAEKEVFLQQMILLFKRINSTQEGQQFLNLLSRSIPVPYESNGDVAMGTTQVIKQMDDKGNVLKHRRAHIIIYGPGPDLMAKGSKALTKSRETGRGCMAEIYFSPMYHKTYSTKLTNKNSLVDKSVQEFVPDPAVTLIHQLCHGLHALYGIDLGNVGSWEFNSNPNSLFSSWFSSKEAVNFEEVMTFGGEDVKVIKSEIDKKIPGILNLIKTTVEPIINKITDPHDEMLQCLQSKYPSLKGTLGQFFFDDTQLEKDIRDLWMVMNETMFAENLKALTAARFLVPKVENIVQVDILSPNVYTIDKGFNHLSKGFKGQSVSQSYFRKISALARGAVVRA

SEQ ID NO: 75 - protein, 1759 aa, Artificial Sequence
  Synthetic
MSDKIIHLTDDSFDTDVLKADGAILVDFWAEWCGPCKMIAPILDEIADEYQGKLTVAKLNIDQNPGTAPKYGIRGIPTLLLFKNGEVAATKVGALSKGQLKEFLDANLAGGSLVPRGSGGSEFMGTQVQLVESGGGLVQPGGSLRLSCAASGSIFSIYAMGWYRQAPGKQRELVAAISSYGSTNYADSVKGRFTISRDNAKNTVYLQMNSLKPEDTAVYYCNADIATMTAVGGFDYWGQGTQVTVSSEPKTPKPQGGGGSGGGGSASQVQLVESGGGLVQPGGSLRLSCAASGFPFHAYYMSWVRQAPGKGLEWVSHIGNGGIITRYADSVKGRFTISRDNAKNTLYLQMTNLKPEDTALYYCTLGTRDDLGPERGQGTQVTVSSEPKTPKPQGGGGSGGGGSKLMKLEINKFNYNDPIDGINVITMRPPRHSDKINKGKGPFKAFQVIKNIWIVPERYNFTNNTNDLNIPSEPIMEADAIYNPNYLNTPSEKDEFLQGVIKVLERIKSKPEGEKLLELISSSIPLPLVSNGALTLSDNETIAYQENNNIVSNLQANLVIYGPGPDIANNATYGLYSTPISNGEGTLSEVSFSPFYLKPFDESYGNYRSLVNIVNKFVKREFAPDPASTLMHQLVHVTHNLYGISNRNFYYNFDTGKIETSRQQNSLIFEELLTFGGIDSKAISSLIIKKIIETAKNNYTTLISERLNTVTVENDLLKYIKNKIPVQGRLGNFKLDTAEFEKKLNTILFVLNESNLAQRFSILVAKHFLKERPIDPIYVNILDDNSYSTLEGFNISSQGSNDFQGQLLESSYFEKIESNALRAFIKICHKAIDGRSLGGSLVPRGSGGSAAAYNKTLDCIEVENKDLFLISNKDSLNDINLSEEKIKPETTVFFKDKLPPQDITLSNYDFTEANSIPSISQQNILERNEELYEPIRNSLFEIKTIYVDKLTTFHFLEAQNIDESIDSSKIRVELTDSVDEALSNPNKVYSPFKNMSNTINSIETGITSTYIFYQWLRSIVKDFSDETGKIDVIDKSSDTLAIVPYIGPLLNIGNDIRHGDFVGAIELAGITALLEYVPEFTIPILVGLEVIGGELAREQVEAIVNNALDKRDQKWAEVYNITKAQWWGTIHLQINTRLAHTYKALSRQANAIKMNMEFQLANYKGNIDDKAKIKNAISETEILLNKSVEQAMKNTEKFMIKLSNSYLTKEMIPKVQDNLKNFDLETKKTLDKFIKEKEDILGTNLSSSLRRKVSIRLNKNIAFDINDIPFSEFDDLINQYKNEIEDYEVLNLGAEDGKIKDLSGTTSDINIGSDIEIINTSILNLRYESNHLIDLSRYASKINIGSKVNFDPIDKNQIQLFNLESSKIEVILKNAIVYNSMYENFSTSFWIRIPKYFNSISLNNEYTIINCMENNSGWKVSLNYGEIIWTLQDTQEIKQRVVFKYSQMINISDYINRWIFVTITNNRLNNSKIYINGRLIDQKPISNLGNIHASNNIMFKLDGCRDTHRYIWIKYFNLFDKELNEKEIKDLYDNQSNSGILKDFWGDYLQYDKPYYMLNLYDPNKYVDVNNVGIRGYMYLKGPRGSVMTTNIYLNSSLYRGTKFIIKKYASGNKDNIVRNNDRVYINVVVKNKEYRLATNASQAGVEKILSALEIPDVGNLSQVVVMKSKNDQGITNKCKMNLQDNNGNDIGFIGFHQFNNIAKLVASNWYNRQIERSSRTLGCSWEFIPVDDGWGERPLQGSLVPRGSGSLEHHHHHH

SEQ ID NO: 76 - protein, 1759 aa, Artificial Sequence
  Synthetic
MSDKIIHLTDDSFDTDVLKADGAILVDFWAEWCGPCKMIAPILDEIADEYQGKLTVAKLNIDQNPGTAPKYGIRGIPTLLLFKNGEVAATKVGALSKGQLKEFLDANLAGGSLVPRGSGGSEFMGTQVQLVESGGGLVQPGGSLRLSCAASGSIFSIYAMGWYRQAPGKQRELVAAISSYGSTNYADSVKGRFTISRDNAKNTVYLQMNSLKPEDTAVYYCNADIATMTAVGGFDYWGQGTQVTVSSEPKTPKPQGGGGSGGGGSASQVQLVESGGGLVQPGGSLRLSCAASGFPFHAYYMSWVRQAPGKGLEWVSHIGNGGIITRYADSVKGRFTISRDNAKNTLYLQMTNLKPEDTALYYCTLGTRDDLGPERGQGTQVTVSSEPKTPKPQGGGGSGGGGSKLMVTINDLHYSDPIDEDNIINMRIPLYDLEVDDQFINHNVPDLKAFQVFPNVWVVPERYTFYSTMKNLDAPANPSRSSYYDPTYLQSDAEKEVFLQQMILLFKRINSTQEGQQFLNLLSRSIPVPYESNGDVAMGTTQVIKQMDDKGNVLKHRRAHIIIYGPGPDLMAKGSKALTKSRETGRGCMAEIYFSPMYHKTYSTKLTNKNSLVDKSVQEFVPDPAVTLIHQLCHGLHALYGIDLGNVGSWEFNSNPNSLFSSWFSSKEAVNFEEVMTFGGEDVKVIKSEIDKKIPGILNLIKTTVEPIINKITDPHDEMLQCLQSKYPSLKGTLGQFFFDDTQLEKDIRDLWMVMNETMFAENLKALTAARFLVPKVENIVQVDILSPNVYTIDKGFNHLSKGFKGQSVSQSYFRKISALARGAVVRACHKAIDGRSLGGSLVPRGSGGSAAAYNKTLDCIEILEDDLFIMSSKDSFTDTDFSEPSVGPVSYKAKKGADTILDSTLSNYDFSKEINFTSTVPIITVEDPLETDEDVPVISEDRTVYVDDYTTFHFLEAQKIGKEVVPTQTKVVFTTNMEEALFDSKKVYTVFENTASRINEAGTGIANGMMFYQWLKGIVQDFTEEATQKDTFDKISDVTMIVPYLGNILNIGNDIRKGDFMGAVELGGVTILLEAIPELTLPVLIGLTIIEDELEKEQVSQTVYNVLDKRDEKWEEVYGFVKQQWWWMVHTQFETRILHAYQALNHQVEAIKANMTYQLANYRGNQEDKELLEKAIDDTLQSLYYAVDQAMHNIKRFLIQSSKSYLLNQMLPKTKEQLLAFDQQTLRNVNDFINKNQGVLGESLAKDLKKKVEKRLTSLPVFNLEDLPISEFEDLIHSHEIDIQDSEVLNIGVNNGKIQDLSGENTPLTLGENLHIINTSILNLRYESNHLIDLSRYASKINIGSKVNFDPIDKNQIQLFNLESSKIEVILKNAIVYNSMYENFSTSFWIRIPKYFNSISLNNEYTIINCMENNSGWKVSLNYGEIIWTLQDTQEIKQRVVFKYSQMINISDYINRWIFVTITNNRLNNSKIYINGRLIDQKPISNLGNIHASNNIMFKLDGCRDTHRYIWIKYFNLFDKELNEKEIKDLYDNQSNSGILKDFWGDYLQYDKPYYMLNLYDPNKYVDVNNVGIRGYMYLKGPRGSVMTTNIYLNSSLYRGTKFIIKKYASGNKDNIVRNNDRVYINVVVKNKEYRLATNASQAGVEKILSALEIPDVGNLSQVVVMKSKNDQGITNKCKMNLQDNNGNDIGFIGFHQFNNIAKLVASNWYNRQIERSSRTLGCSWEFIPVDDGWGERPLQGSLVPRGSGSLEHHHHHH

SEQ ID NO: 77 - protein, 6 aa, Artificial Sequence
  Synthetic
LVPRGS

SEQ ID NO: 78 - protein, 7 aa, Artificial Sequence
  Synthetic
ENLYFQG

SEQ ID NO: 79 - protein, 8 aa, Artificial Sequence
  Synthetic
LEVLFQGP

SEQ ID NO: 80 - protein, 4 aa, Artificial Sequence
  Synthetic
IEGR

SEQ ID NO: 81 - protein, 4 aa, Artificial Sequence
  Synthetic
IEGR

SEQ ID NO: 82 - protein, 8 aa, Artificial Sequence
  Synthetic
AHREQIGG

SEQ ID NO: 83 - protein, 5 aa, Artificial Sequence
  Synthetic
DDDDK

SEQ ID NO: 84 - protein, 32 aa, Artificial Sequence
  Synthetic
CHKAIDGRSLGGSLVPRGSGGSAAAYNKTLDC

SEQ ID NO: 85 - protein, 1260 aa, Artificial Sequence
  Synthetic
MLQIRVFNYNDPIDGENIVELRYHNRSPVKAFQIVDGIWIIPERYNFTNDTKKVPDDRALTILEDEVFAVRENDYLTTDVNEKNSFLNNITKLFKRINSSNIGNQLLNYISTSVPYPVVSTNSIKARDYNTIKFDSIDGRRITKSANVLIYGPSMKNLLDKQTRAINGEEAKNGIGCLSDIIFSPNYLSVQTVSSSRFVEDPASSLTHELIHALHNLYGIQYPGEEKFKFGGFIDKLLGTRECIDYEEVLTYGGKDSEIIRKKIDKSLYPDDFVNKYGEMYKRIKGSNPYYPDEKKLKQSFLNRMNPFDQNGTFDTKEFKNHLMDLWFGLNESEFAKEKKILVRKHYITKQINPKYTELTNDVYTEDKGFVNGQSIDNQNFKIIDDLISKKVKLCSITSKNRVNICIDVNKEDLYFISDKEGFENIDFSEPEIRYDSNVTTATTSSFTDHFLVNRTFNDSDRFPPVELEYAIEPAEIVDNTIMPDIDQKSEISLDNLTTFHYLNAQKMDLGFDSSKEQLKMVTSIEESLLDSKKVYTPFTRTAHSVNERISGIAESYLFYQWLKTVINDFTDELNQKSNTDKVADISWIIPYVGPALNIGLDLSHGDFTKAFEDLGVSILFAIAPEFATISLVALSIYENIEEDSQKEKVINKVENTLARRIEKWHQVYAFMVAQWWGMVHTQIDTRIHQMYESLSHQIIAIKANMEYQLSHYKGPDNDKLLLKDYIYEAEIALNTSANRAMKNIERFMIESSISYLKNNLIPSVVENLKKFDADTKKNLDQFIDKNSSVLGSDLHILKSQVDLELNPTTKVAFNIQSIPDFDINALIDRLGIQLKDNLVFSLGVESDKIKDLSGNNTNLEVKTGVQIVDGRDSKTIRLNSNENSSIIVQKNESINFSYFSDFTISFWIRVPRLNKNDFIDLGIEYDLVNNMDNQGWKISLKDGNLVWRMKDRFGKIIDIITSLTFSNSFIDKYISSNIWRHITITVNQLKDCTLYINGDKIDSKSINELRGIDNNSPIIFKLEGNRNKNQFIRLDQFNIYQRALNESEVEMLFNSYFNSNILRDFWGEPLEYNKSYYMINQAILGGPLRSTYKSWYGEYYPYISRMRTFNVSSFILIPYLYHKGSDVEKVKIINKNNVDKYVRKNDVADVKFENYGNLILTLPMYSKIKERYMVLNEGRNGDLKLIQLQSNDKYYCQIRIFEMYRNGLLSIADDENWLYSSGWYLYSSGWYLDNYKTLDLKKHTKTNWYFVSEDEGWKE

SEQ ID NO: 86 - protein, 834 aa, Artificial Sequence
  Synthetic
MLQIRVFNYNDPIDGENIVELRYHNRSPVKAFQIVDGIWIIPERYNFTNDTKKVPDDRALTILEDEVFAVRENDYLTTDVNEKNSFLNNITKLFKRINSSNIGNQLLNYISTSVPYPVVSTNSIKARDYNTIKFDSIDGRRITKSANVLIYGPSMKNLLDKQTRAINGEEAKNGIGCLSDIIFSPNYLSVQTVSSSRFVEDPASSLTHQLIHALHNLYGIQYPGEEKFKFGGFIDKLLGTRECIDYEEVLTYGGKDSEIIRKKIDKSLYPDDFVNKYGEMYKRIKGSNPYYPDEKKLKQSFLNRMNPFDQNGTFDTKEFKNHLMDLWFGLNESEFAKEKKILVAKHFITKQINPKYTELTNDVYTEDKGFVNGQSIDNQNFKIIDDLISKKVKLCSITSKNRVNICIDVNKEDLYFISDKEGFENIDFSEPEIRYDSNVTTATTSSFTDHFLVNRTFNDSDRFPPVELEYAIEPAEIVDNTIMPDIDQKSEISLDNLTTFHYLNAQKMDLGFDSSKEQLKMVTSIEESLLDSKKVYTPFTRTAHSVNERISGIAESYLFYQWLKTVINDFTDELNQKSNTDKVADISWIIPYVGPALNIGLDLSHGDFTKAFEDLGVSILFAIAPEFATISLVALSIYENIEEDSQKEKVINKVENTLARRIEKWHQVYAFMVAQWWGMVHTQIDTRIHQMYESLSHQIIAIKANMEYQLSHYKGPDNDKLLLKDYIYEAEIALNTSANRAMKNIERFMIESSISYLKNNLIPSVVENLKKFDADTKKNLDQFIDKNSSVLGSDLHILKSQVDLELNPTTKVAFNIQSIPDFDINALIDRLGIQ

SEQ ID NO: 87 - protein, 1259 aa, Artificial Sequence
  Synthetic
MLQIRVFNYNDPIDGENIVELRYHNRSPVKAFQIVDGIWIIPERYNFTNDTKKVPDDRALTILEDEVFAVRENDYLTTDVNEKNSFLNNITKLFKRINSSNIGNQLLNYISTSVPYPVVSTNSIKARDYNTIKFDSIDGRRITKSANVLIYGPSMKNLLDKQTRAINGEEAKNGIGCLSDIIFSPNYLSVQTVSSSRFVEDPASSLTHQLIHALHNLYGIQYPGEEKFKFGGFIDKLLGTRECIDYEEVLTYGGKDSEIIRKKIDKSLYPDDFVNKYGEMYKRIKGSNPYYPDEKKLKQSFLNRMNPFDQNGTFDTKEFKNHLMDLWFGLNESEFAKEKKILVAKHFITKQINPKYTELTNDVYTEDKGFVNGQSIDNQNFKIIDDLISKKVKLCSITSKNRVNICIDVNKEDLYFISDKEGFENIDFSEPEIRYDSNVTTATTSSFTDHFLVNRTFNDSDRFPPVELEYAIEPAEIVDNTIMPDIDQKSEISLDNLTTFHYLNAQKMDLGFDSSKEQLKMVTSIEESLLDSKKVYTPFTRTAHSVNERISGIAESYLFYQWLKTVINDFTDELNQKSNTDKVADISWIIPYVGPALNIGLDLSHGDFTKAFEDLGVSILFAIAPEFATISLVALSIYENIEEDSQKEKVINKVENTLARRIEKWHQVYAFMVAQWWGMVHTQIDTRIHQMYESLSHQIIAIKANMEYQLSHYKGPDNDKLLLKDYIYEAEIALNTSANRAMKNIERFMIESSISYLKNNLIPSVVENLKKFDADTKKNLDQFIDKNSSVLGSDLHILKSQVDLELNPTTKVAFNIQSIPDFDINALIDRLGIQIINTSILNLRYESNHLIDLSRYASKINIGSKVNFDPIDKNQIQLFNLESSKIEVILKNAIVYNSMYENFSTSFWIRIPKYFNSISLNNEYTIINCMENNSGWKVSLNYGEIIWTLQDTQEIKQRVVFKYSQMINISDYINRWIFVTITNNRLNNSKIYINGRLIDQKPISNLGNIHASNNIMFKLDGCRDTHRYIWIKYFNLFDKELNEKEIKDLYDNQSNSGILKDFWGDYLQYDKPYYMLNLYDPNKYVDVNNVGIRGYMYLKGPRGSVMTTNIYLNSSLYRGTKFIIKKYASGNKDNIVRNNDRVYINVVVKNKEYRLATNASQAGVEKILSALEIPDVGNLSQVVVMKSKNDQGITNKCKMNLQDNNGNDIGFIGFHQFNNIAKLVASNWYNRQIERSSRTLGCSWEFIPVDDGWGERPLQ

SEQ ID NO: 88 - protein, 1266 aa, Artificial Sequence
  Synthetic
MLQIRVFNYNDPIDGENIVELRYHNRSPVKAFQIVDGIWIIPERYNFTNDTKKVPDDRALTILEDEVFAVRENDYLTTDVNEKNSFLNNITKLFKRINSSNIGNQLLNYISTSVPYPVVSTNSIKARDYNTIKFDSIDGRRITKSANVLIYGPSMKNLLDKQTRAINGEEAKNGIGCLSDIIFSPNYLSVQTVSSSRFVEDPASSLTHQLIHALHNLYGIQYPGEEKFKFGGFIDKLLGTRECIDYEEVLTYGGKDSEIIRKKIDKSLYPDDFVNKYGEMYKRIKGSNPYYPDEKKLKQSFLNRMNPFDQNGTFDTKEFKNHLMDLWFGLNESEFAKEKKILVAKHFITKQINPKYTELTNDVYTEDKGFVNGQSIDNQNFKIIDDLISKKVKLCSITSKNRVNICIDVNKEDLYFISDKEGFENIDFSEPEIRYDSNVTTATTSSFTDHFLVNRTFNDSDRFPPVELEYAIEPAEIVDNTIMPDIDQKSEISLDNLTTFHYLNAQKMDLGFDSSKEQLKMVTSIEESLLDSKKVYTPFTRTAHSVNERISGIAESYLFYQWLKTVINDFTDELNQKSNTDKVADISWIIPYVGPALNIGLDLSHGDFTKAFEDLGVSILFAIAPEFATISLVALSIYENIEEDSQKEKVINKVENTLARRIEKWHQVYAFMVAQWWGMVHTQIDTRIHQMYESLSHQIIAIKANMEYQLSHYKGPDNDKLLLKDYIYEAEIALNTSANRAMKNIERFMIESSISYLKNNLIPSVVENLKKFDADTKKNLDQFIDKNSSVLGSDLHILKSQVDLELNPTTKVAFNIQSIPDFDINALIDRLGIQILNNIILNLRYKDNNLIDLSGYGAKVEVYDGVELNDKNQFKLTSSANSKIRVTQNQNIIFNSVFLDFSVSFWIRIPKYKNDGIQNYIHNEYTIINCMKNNSGWKISIRGNRIIWTLIDINGKTKSVFFEYNIREDISEYINRWFFVTITNNLNNAKIYINGKLESNTDIKDIREVIANGEIIFKLDGDIDRTQFIWMKYFSIFNTELSQSNIEERYKIQSYSEYLKDFWGNPLMYNKEYYMFNAGNKNSYIKLKKDSPVGEILTRSKYNQNSKYINYRDLYIGEKFIIRRKSNSQSINDDIVRKEDYIYLDFFNLNQEWRVYTYKYFKKEEEKLFLAPISDSDEFYNTIQIKEYDEQPTYSCQLLFKKDEESTDEIGLIGIHRFYESGIVFEEYKDYFCISKWYLKEVKRKPYNLKLGCNWQFIPKDEGWTE

SEQ ID NO: 89 - protein, 1258 aa, Artificial Sequence
  Synthetic
MLQIRVFNYNDPIDGENIVELRYHNRSPVKAFQIVDGIWIIPERYNFTNDTKKVPDDRALTILEDEVFAVRENDYLTTDVNEKNSFLNNITKLFKRINSSNIGNQLLNYISTSVPYPVVSTNSIKARDYNTIKFDSIDGRRITKSANVLIYGPSMKNLLDKQTRAINGEEAKNGIGCLSDIIFSPNYLSVQTVSSSRFVEDPASSLTHQLIHALHNLYGIQYPGEEKFKFGGFIDKLLGTRECIDYEEVLTYGGKDSEIIRKKIDKSLYPDDFVNKYGEMYKRIKGSNPYYPDEKKLKQSFLNRMNPFDQNGTFDTKEFKNHLMDLWFGLNESEFAKEKKILVAKHFITKQINPKYTELTNDVYTEDKGFVNGQSIDNQNFKIIDDLISKKVKLCSITSKNRVNICIDVNKEDLYFISDKEGFENIDFSEPEIRYDSNVTTATTSSFTDHFLVNRTFNDSDRFPPVELEYAIEPAEIVDNTIMPDIDQKSEISLDNLTTFHYLNAQKMDLGFDSSKEQLKMVTSIEESLLDSKKVYTPFTRTAHSVNERISGIAESYLFYQWLKTVINDFTDELNQKSNTDKVADISWIIPYVGPALNIGLDLSHGDFTKAFEDLGVSILFAIAPEFATISLVALSIYENIEEDSQKEKVINKVENTLARRIEKWHQVYAFMVAQWWGMVHTQIDTRIHQMYESLSHQIIAIKANMEYQLSHYKGPDNDKLLLKDYIYEAEIALNTSANRAMKNIERFMIESSISYLKNNLIPSVVENLKKFDADTKKNLDQFIDKNSSVLGSDLHILKSQVDLELNPTTKVAFNIQSIPDFDINALIDRLGIQINDSKILSLQNRKNTLVDTSGYNAEVSEEGDVQLNPIFPFDFKLGSSGEDRGKVIVTQNENIVYNSMYESFSISFWIRINKWVSNLPGYTIIDSVKNNSGWSIGIISNFLVFTLKQNEDSEQSINFSYDISNNAPGYNKWFFVTVTNNMMGNMKIYINGKLIDTIKVKELTGINFSKTITFEINKIPDTGLITSDSDNINMWIRDFYIFAKELDGKDINILFNSLQYTNVVKDYWGNDLRYNKEYYMVNIDYLNRYMYANSRQIVFNTRRNNNDFNEGYKIIIKRIRGNTNDTRVRGGDILYFDMTINNKAYNLFMKNETMYADNHSTEDIYAIGLREQTKDINDNIIFQIQPMNNTYYYASQIFKSNFNGENISGICSIGTYRFRLGGDWYRHNYLVPTVKQGNYASLLESTSTHWGFVPVSE

SEQ ID NO: 90 - protein, 1247 aa, Artificial Sequence
  Synthetic
MLQIRVFNYNDPIDGENIVELRYHNRSPVKAFQIVDGIWIIPERYNFTNDTKKVPDDRALTILEDEVFAVRENDYLTTDVNEKNSFLNNITKLFKRINSSNIGNQLLNYISTSVPYPVVSTNSIKARDYNTIKFDSIDGRRITKSANVLIYGPSMKNLLDKQTRAINGEEAKNGIGCLSDIIFSPNYLSVQTVSSSRFVEDPASSLTHQLIHALHNLYGIQYPGEEKFKFGGFIDKLLGTRECIDYEEVLTYGGKDSEIIRKKIDKSLYPDDFVNKYGEMYKRIKGSNPYYPDEKKLKQSFLNRMNPFDQNGTFDTKEFKNHLMDLWFGLNESEFAKEKKILVAKHFITKQINPKYTELTNDVYTEDKGFVNGQSIDNQNFKIIDDLISKKVKLCSITSKNRVNICIDVNKEDLYFISDKEGFENIDFSEPEIRYDSNVTTATTSSFTDHFLVNRTFNDSDRFPPVELEYAIEPAEIVDNTIMPDIDQKSEISLDNLTTFHYLNAQKMDLGFDSSKEQLKMVTSIEESLLDSKKVYTPFTRTAHSVNERISGIAESYLFYQWLKTVINDFTDELNQKSNTDKVADISWIIPYVGPALNIGLDLSHGDFTKAFEDLGVSILFAIAPEFATISLVALSIYENIEEDSQKEKVINKVENTLARRIEKWHQVYAFMVAQWWGMVHTQIDTRIHQMYESLSHQIIAIKANMEYQLSHYKGPDNDKLLLKDYIYEAEIALNTSANRAMKNIERFMIESSISYLKNNLIPSVVENLKKFDADTKKNLDQFIDKNSSVLGSDLHILKSQVDLELNPTTKVAFNIQSIPDFDINALIDRLGIQINDSKILSLQNKKNALVDTSGYNAEVRVGDNVQLNTIYTNDFKLSSSGDKIIVNLNNNILYSAIYENSSVSFWIKISKDLTNSHNEYTIINSIEQNSGWKLCIRNGNIEWILQDVNRKYKSLIFDYSESLSHTGYTNKWFFVTITNNIMGYMKLYINGELKQSQKIEDLDEVKLDKTIVFGIDENIDENQMLWIRDFNIFSKELSNEDINIVYEGQILRNVIKDYWGNPLKFDTEYYIINDNYIDRYIAPESNVLVLVQYPDRSKLYTGNPITIKSVSDKNPYSRILNGDNIILHMLYNSRKYMIIRDTDTIYATQGGECSQNCVYALKLQSNLGNYGIGIFSIKNIVSKNKYCSQIFSSFRENTMLLADIYKPWRFSFKNAYTPVAVTNYETKLLSTSSFWKFISRDPGWVE

SEQ ID NO: 91 - protein, 1240 aa, Artificial Sequence
  Synthetic
MLQIRVFNYNDPIDGENIVELRYHNRSPVKAFQIVDGIWIIPERYNFTNDTKKVPDDRALTILEDEVFAVRENDYLTTDVNEKNSFLNNITKLFKRINSSNIGNQLLNYISTSVPYPVVSTNSIKARDYNTIKFDSIDGRRITKSANVLIYGPSMKNLLDKQTRAINGEEAKNGIGCLSDIIFSPNYLSVQTVSSSRFVEDPASSLTHQLIHALHNLYGIQYPGEEKFKFGGFIDKLLGTRECIDYEEVLTYGGKDSEIIRKKIDKSLYPDDFVNKYGEMYKRIKGSNPYYPDEKKLKQSFLNRMNPFDQNGTFDTKEFKNHLMDLWFGLNESEFAKEKKILVAKHFITKQINPKYTELTNDVYTEDKGFVNGQSIDNQNFKIIDDLISKKVKLCSITSKNRVNICIDVNKEDLYFISDKEGFENIDFSEPEIRYDSNVTTATTSSFTDHFLVNRTFNDSDRFPPVELEYAIEPAEIVDNTIMPDIDQKSEISLDNLTTFHYLNAQKMDLGFDSSKEQLKMVTSIEESLLDSKKVYTPFTRTAHSVNERISGIAESYLFYQWLKTVINDFTDELNQKSNTDKVADISWIIPYVGPALNIGLDLSHGDFTKAFEDLGVSILFAIAPEFATISLVALSIYENIEEDSQKEKVINKVENTLARRIEKWHQVYAFMVAQWWGMVHTQIDTRIHQMYESLSHQIIAIKANMEYQLSHYKGPDNDKLLLKDYIYEAEIALNTSANRAMKNIERFMIESSISYLKNNLIPSVVENLKKFDADTKKNLDQFIDKNSSVLGSDLHILKSQVDLELNPTTKVAFNIQSIPDFDINALIDRLGIQIKSSSVLNMRYKNDKYVDTSGYDSNININGDVYKYPTNKNQFGIYNDKLSEVNISQNDYIIYDNKYKNFSISFWVRIPNYDNKIVNVNNEYTIINCMRDNNSGWKVSLNHNEIIWTLQDNAGINQKLAFNYGNANGISDYINKWIFVTITNDRLGDSKLYINGNLIDQKSILNLGNIHVSDNILFKIVNCSYTRYIGIRYFNIFDKELDETEIQTLYSNEPNTNILKDFWGNYLLYDKEYYLLNVLKPNNFIDRRKDSTLSINNIRSTILLANRLYSGIKVKIQRVNNSSTNDNLVRKNDQVYINFVASKTHLFPLYADTATTNKEKTIKISSSGNRFNQVVVMNSVGNNCTMNFKNNNGNNIGLLGFKADTVVASTWYYTHMRDHTNSNGCFWNFISEEHGWQEK

SEQ ID NO: 92 - protein, 1247 aa, Artificial Sequence
  Synthetic
MLQIRVFNYNDPIDGENIVELRYHNRSPVKAFQIVDGIWIIPERYNFTNDTKKVPDDRALTILEDEVFAVRENDYLTTDVNEKNSFLNNITKLFKRINSSNIGNQLLNYISTSVPYPVVSTNSIKARDYNTIKFDSIDGRRITKSANVLIYGPSMKNLLDKQTRAINGEEAKNGIGCLSDIIFSPNYLSVQTVSSSRFVEDPASSLTHQLIHALHNLYGIQYPGEEKFKFGGFIDKLLGTRECIDYEEVLTYGGKDSEIIRKKIDKSLYPDDFVNKYGEMYKRIKGSNPYYPDEKKLKQSFLNRMNPFDQNGTFDTKEFKNHLMDLWFGLNESEFAKEKKILVAKHFITKQINPKYTELTNDVYTEDKGFVNGQSIDNQNFKIIDDLISKKVKLCSITSKNRVNICIDVNKEDLYFISDKEGFENIDFSEPEIRYDSNVTTATTSSFTDHFLVNRTFNDSDRFPPVELEYAIEPAEIVDNTIMPDIDQKSEISLDNLTTFHYLNAQKMDLGFDSSKEQLKMVTSIEESLLDSKKVYTPFTRTAHSVNERISGIAESYLFYQWLKTVINDFTDELNQKSNTDKVADISWIIPYVGPALNIGLDLSHGDFTKAFEDLGVSILFAIAPEFATISLVALSIYENIEEDSQKEKVINKVENTLARRIEKWHQVYAFMVAQWWGMVHTQIDTRIHQMYESLSHQIIAIKANMEYQLSHYKGPDNDKLLLKDYIYEAEIALNTSANRAMKNIERFMIESSISYLKNNLIPSVVENLKKFDADTKKNLDQFIDKNSSVLGSDLHILKSQVDLELNPTTKVAFNIQSIPDFDINALIDRLGIQIKDNSILDMRYENNKFIDISGYGSNISINGDVYIYSTNRNQFGIYSSKPSEVNIAQNNDIIYNGRYQNFSISFWVRIPKYFNKVNLNNEYTIIDCIRNNNSGWKISLNYNKIIWTLQDTAGNNQKLVFNYTQMISISDYINKWIFVTITNNRLGNSRIYINGNLIDEKSISNLGDIHVSDNILFKIVGCNDTRYVGIRYFKVFDTELGKTEIETLYSDEPDPSILKDFWGNYLLYNKRYYLLNLLRTDKSITQNSNFLNINQQRGVYQKPNIFSNTRLYTGVEVIIRKNGSTDISNTDNFVRKNDLAYINVVDRDVEYRLYADISIAKPEKIIKLIRTSNSNNSLGQIIVMDSIGNNCTMNFQNNNGGNIGLLGFHSNNLVASSWYYNNIRKNTSSNGCFWSFISKEHGWQEN

SEQ ID NO: 93 - protein, 1267 aa, Artificial Sequence
  Synthetic
MLQIRVFNYNDPIDGENIVELRYHNRSPVKAFQIVDGIWIIPERYNFTNDTKKVPDDRALTILEDEVFAVRENDYLTTDVNEKNSFLNNITKLFKRINSSNIGNQLLNYISTSVPYPVVSTNSIKARDYNTIKFDSIDGRRITKSANVLIYGPSMKNLLDKQTRAINGEEAKNGIGCLSDIIFSPNYLSVQTVSSSRFVEDPASSLTHQLIHALHNLYGIQYPGEEKFKFGGFIDKLLGTRECIDYEEVLTYGGKDSEIIRKKIDKSLYPDDFVNKYGEMYKRIKGSNPYYPDEKKLKQSFLNRMNPFDQNGTFDTKEFKNHLMDLWFGLNESEFAKEKKILVAKHFITKQINPKYTELTNDVYTEDKGFVNGQSIDNQNFKIIDDLISKKVKLCSITSKNRVNICIDVNKEDLYFISDKEGFENIDFSEPEIRYDSNVTTATTSSFTDHFLVNRTFNDSDRFPPVELEYAIEPAEIVDNTIMPDIDQKSEISLDNLTTFHYLNAQKMDLGFDSSKEQLKMVTSIEESLLDSKKVYTPFTRTAHSVNERISGIAESYLFYQWLKTVINDFTDELNQKSNTDKVADISWIIPYVGPALNIGLDLSHGDFTKAFEDLGVSILFAIAPEFATISLVALSIYENIEEDSQKEKVINKVENTLARRIEKWHQVYAFMVAQWWGMVHTQIDTRIHQMYESLSHQIIAIKANMEYQLSHYKGPDNDKLLLKDYIYEAEIALNTSANRAMKNIERFMIESSISYLKNNLIPSVVENLKKFDADTKKNLDQFIDKNSSVLGSDLHILKSQVDLELNPTTKVAFNIQSIPDFDINALIDRLGIQISSNAILSLSYRGGRLIDSSGYGATMNVGSDVIFNDIGNGQFKLNNSENSNITAHQSKFVVYDSMFDNFSINFWVRTPKYNNNDIQTYLQNEYTIISCIKNDSGWKVSIKGNRIIWTLIDVNAKSKSIFFEYSIKDNISDYINKWFSITITNDRLGNANIYINGSLKKSEKILNLDRINSSNDIDFKLINCTDTTKFVWIKDFNIFGRELNATEVSSLYWIQSSTNTLKDFWGNPLRYDTQYYLFNQGMQNIYIKYFSKASMGETAPRTNFNNAAINYQNLYLGLRFIIKKASNSRNINNDNIVREGDYIYLNIDNISDESYRVYVLVNSKEIQTQLFLAPINDDPTFYDVLQIKKYYEKTTYNCQILCEKDTKTFGLFGIGKFVKDYGYVWDTYDNYFCISQWYLRRISENINKLRLGCNWQFIPVDEGWTE

SEQ ID NO: 94 - protein, 1262 aa, Artificial Sequence
  Synthetic
MLQIRVFNYNDPIDGENIVELRYHNRSPVKAFQIVDGIWIIPERYNFTNDTKKVPDDRALTILEDEVFAVRENDYLTTDVNEKNSFLNNITKLFKRINSSNIGNQLLNYISTSVPYPVVSTNSIKARDYNTIKFDSIDGRRITKSANVLIYGPSMKNLLDKQTRAINGEEAKNGIGCLSDIIFSPNYLSVQTVSSSRFVEDPASSLTHQLIHALHNLYGIQYPGEEKFKFGGFIDKLLGTRECIDYEEVLTYGGKDSEIIRKKIDKSLYPDDFVNKYGEMYKRIKGSNPYYPDEKKLKQSFLNRMNPFDQNGTFDTKEFKNHLMDLWFGLNESEFAKEKKILVAKHFITKQINPKYTELTNDVYTEDKGFVNGQSIDNQNFKIIDDLISKKVKLCSITSKNRVNICIDVNKEDLYFISDKEGFENIDFSEPEIRYDSNVTTATTSSFTDHFLVNRTFNDSDRFPPVELEYAIEPAEIVDNTIMPDIDQKSEISLDNLTTFHYLNAQKMDLGFDSSKEQLKMVTSIEESLLDSKKVYTPFTRTAHSVNERISGIAESYLFYQWLKTVINDFTDELNQKSNTDKVADISWIIPYVGPALNIGLDLSHGDFTKAFEDLGVSILFAIAPEFATISLVALSIYENIEEDSQKEKVINKVENTLARRIEKWHQVYAFMVAQWWGMVHTQIDTRIHQMYESLSHQIIAIKANMEYQLSHYKGPDNDKLLLKDYIYEAEIALNTSANRAMKNIERFMIESSISYLKNNLIPSVVENLKKFDADTKKNLDQFIDKNSSVLGSDLHILKSQVDLELNPTTKVAFNIQSIPDFDINALIDRLGIQLKYNCILNIKYEMDRDKLVDSSGYRSRINIGTGVKFSEIDKNQVQLSNLESSKIEVILNNGVIYNSMYENFSTSFWIRIPKYFRNINNEYKIISCMQNNSGWEVSLNFSNMNSKIIWTLQDTEGIKKTVVFQYTQNINISDYINRWIFVTITNNRLSNSKIYINGRLINEESISDLGNIHASNNIMFKLDGCRDPHRYIWIKYFNLFDKELNKKEIKDLYDNQSNSGILKDFWGDYLQYDKPYYMLNLYDPNKYLDVNNVGIRGYMYLKGPRGRIVTTNIYLNSTLYMGTKFIIKKYASGNKDNIVRNNDRVYINVVVKNKEYRLATNASQAGVEKILSAVEIPDVGNLSQVVVMKSENDQGIRNKCKMNLQDNNGNDIGFIGFHQFNNIAKLVASNWYNRQIGKASRTFGCSWEFIPVDDGWGESSL

SEQ ID NO: 95 - protein, 854 aa, Artificial Sequence
  Synthetic
MLQIRVFNYNDPIDGENIVELRYHNRSPVKAFQIVDGIWIIPERYNFTNDTKKVPDDRALTILEDEVFAVRENDYLTTDVNEKNSFLNNITKLFKRINSSNIGNQLLNYISTSVPYPVVSTNSIKARDYNTIKFDSIDGRRITKSANVLIYGPSMKNLLDKQTRAINGEEAKNGIGCLSDIIFSPNYLSVQTVSSSRFVEDPASSLTHQLIHALHNLYGIQYPGEEKFKFGGFIDKLLGTRECIDYEEVLTYGGKDSEIIRKKIDKSLYPDDFVNKYGEMYKRIKGSNPYYPDEKKLKQSFLNRMNPFDQNGTFDTKEFKNHLMDLWFGLNESEFAKEKKILVAKHFITKQINPKYTELTNDVYTEDKGFVNGQSIDNQNFKIIDDLISKKVKLCHKAIDGRSLGGSLVPRGSGGSAAAYNKTLDCIDVNKEDLYFISDKEGFENIDFSEPEIRYDSNVTTATTSSFTDHFLVNRTFNDSDRFPPVELEYAIEPAEIVDNTIMPDIDQKSEISLDNLTTFHYLNAQKMDLGFDSSKEQLKMVTSIEESLLDSKKVYTPFTRTAHSVNERISGIAESYLFYQWLKTVINDFTDELNQKSNTDKVADISWIIPYVGPALNIGLDLSHGDFTKAFEDLGVSILFAIAPEFATISLVALSIYENIEEDSQKEKVINKVENTLARRIEKWHQVYAFMVAQWWGMVHTQIDTRIHQMYESLSHQIIAIKANMEYQLSHYKGPDNDKLLLKDYIYEAEIALNTSANRAMKNIERFMIESSISYLKNNLIPSVVENLKKFDADTKKNLDQFIDKNSSVLGSDLHILKSQVDLELNPTTKVAFNIQSIPDFDINALIDRLGIQ

SEQ ID NO: 96 - protein, 1279 aa, Artificial Sequence
  Synthetic
MLQIRVFNYNDPIDGENIVELRYHNRSPVKAFQIVDGIWIIPERYNFTNDTKKVPDDRALTILEDEVFAVRENDYLTTDVNEKNSFLNNITKLFKRINSSNIGNQLLNYISTSVPYPVVSTNSIKARDYNTIKFDSIDGRRITKSANVLIYGPSMKNLLDKQTRAINGEEAKNGIGCLSDIIFSPNYLSVQTVSSSRFVEDPASSLTHQLIHALHNLYGIQYPGEEKFKFGGFIDKLLGTRECIDYEEVLTYGGKDSEIIRKKIDKSLYPDDFVNKYGEMYKRIKGSNPYYPDEKKLKQSFLNRMNPFDQNGTFDTKEFKNHLMDLWFGLNESEFAKEKKILVAKHFITKQINPKYTELTNDVYTEDKGFVNGQSIDNQNFKIIDDLISKKVKLCHKAIDGRSLGGSLVPRGSGGSAAAYNKTLDCIDVNKEDLYFISDKEGFENIDFSEPEIRYDSNVTTATTSSFTDHFLVNRTFNDSDRFPPVELEYAIEPAEIVDNTIMPDIDQKSEISLDNLTTFHYLNAQKMDLGFDSSKEQLKMVTSIEESLLDSKKVYTPFTRTAHSVNERISGIAESYLFYQWLKTVINDFTDELNQKSNTDKVADISWIIPYVGPALNIGLDLSHGDFTKAFEDLGVSILFAIAPEFATISLVALSIYENIEEDSQKEKVINKVENTLARRIEKWHQVYAFMVAQWWGMVHTQIDTRIHQMYESLSHQIIAIKANMEYQLSHYKGPDNDKLLLKDYIYEAEIALNTSANRAMKNIERFMIESSISYLKNNLIPSVVENLKKFDADTKKNLDQFIDKNSSVLGSDLHILKSQVDLELNPTTKVAFNIQSIPDFDINALIDRLGIQIINTSILNLRYESNHLIDLSRYASKINIGSKVNFDPIDKNQIQLFNLESSKIEVILKNAIVYNSMYENFSTSFWIRIPKYFNSISLNNEYTIINCMENNSGWKVSLNYGEIIWTLQDTQEIKQRVVFKYSQMINISDYINRWIFVTITNNRLNNSKIYINGRLIDQKPISNLGNIHASNNIMFKLDGCRDTHRYIWIKYFNLFDKELNEKEIKDLYDNQSNSGILKDFWGDYLQYDKPYYMLNLYDPNKYVDVNNVGIRGYMYLKGPRGSVMTTNIYLNSSLYRGTKFIIKKYASGNKDNIVRNNDRVYINVVVKNKEYRLATNASQAGVEKILSALEIPDVGNLSQVVVMKSKNDQGITNKCKMNLQDNNGNDIGFIGFHQFNNIAKLVASNWYNRQIERSSRTLGCSWEFIPVDDGWGERPLQ

SEQ ID NO: 97 - protein, 1286 aa, Artificial Sequence
  Synthetic
MLQIRVFNYNDPIDGENIVELRYHNRSPVKAFQIVDGIWIIPERYNFTNDTKKVPDDRALTILEDEVFAVRENDYLTTDVNEKNSFLNNITKLFKRINSSNIGNQLLNYISTSVPYPVVSTNSIKARDYNTIKFDSIDGRRITKSANVLIYGPSMKNLLDKQTRAINGEEAKNGIGCLSDIIFSPNYLSVQTVSSSRFVEDPASSLTHQLIHALHNLYGIQYPGEEKFKFGGFIDKLLGTRECIDYEEVLTYGGKDSEIIRKKIDKSLYPDDFVNKYGEMYKRIKGSNPYYPDEKKLKQSFLNRMNPFDQNGTFDTKEFKNHLMDLWFGLNESEFAKEKKILVAKHFITKQINPKYTELTNDVYTEDKGFVNGQSIDNQNFKIIDDLISKKVKLCHKAIDGRSLGGSLVPRGSGGSAAAYNKTLDCIDVNKEDLYFISDKEGFENIDFSEPEIRYDSNVTTATTSSFTDHFLVNRTFNDSDRFPPVELEYAIEPAEIVDNTIMPDIDQKSEISLDNLTTFHYLNAQKMDLGFDSSKEQLKMVTSIEESLLDSKKVYTPFTRTAHSVNERISGIAESYLFYQWLKTVINDFTDELNQKSNTDKVADISWIIPYVGPALNIGLDLSHGDFTKAFEDLGVSILFAIAPEFATISLVALSIYENIEEDSQKEKVINKVENTLARRIEKWHQVYAFMVAQWWGMVHTQIDTRIHQMYESLSHQIIAIKANMEYQLSHYKGPDNDKLLLKDYIYEAEIALNTSANRAMKNIERFMIESSISYLKNNLIPSVVENLKKFDADTKKNLDQFIDKNSSVLGSDLHILKSQVDLELNPTTKVAFNIQSIPDFDINALIDRLGIQILNNIILNLRYKDNNLIDLSGYGAKVEVYDGVELNDKNQFKLTSSANSKIRVTQNQNIIFNSVFLDFSVSFWIRIPKYKNDGIQNYIHNEYTIINCMKNNSGWKISIRGNRIIWTLIDINGKTKSVFFEYNIREDISEYINRWFFVTITNNLNNAKIYINGKLESNTDIKDIREVIANGEIIFKLDGDIDRTQFIWMKYFSIFNTELSQSNIEERYKIQSYSEYLKDFWGNPLMYNKEYYMFNAGNKNSYIKLKKDSPVGEILTRSKYNQNSKYINYRDLYIGEKFIIRRKSNSQSINDDIVRKEDYIYLDFFNLNQEWRVYTYKYFKKEEEKLFLAPISDSDEFYNTIQIKEYDEQPTYSCQLLFKKDEESTDEIGLIGIHRFYESGIVFEEYKDYFCISKWYLKEVKRKPYNLKLGCNWQFIPKDEGWTE

SEQ ID NO: 98 - protein, 1278 aa, Artificial Sequence
  Synthetic
MLQIRVFNYNDPIDGENIVELRYHNRSPVKAFQIVDGIWIIPERYNFTNDTKKVPDDRALTILEDEVFAVRENDYLTTDVNEKNSFLNNITKLFKRINSSNIGNQLLNYISTSVPYPVVSTNSIKARDYNTIKFDSIDGRRITKSANVLIYGPSMKNLLDKQTRAINGEEAKNGIGCLSDIIFSPNYLSVQTVSSSRFVEDPASSLTHQLIHALHNLYGIQYPGEEKFKFGGFIDKLLGTRECIDYEEVLTYGGKDSEIIRKKIDKSLYPDDFVNKYGEMYKRIKGSNPYYPDEKKLKQSFLNRMNPFDQNGTFDTKEFKNHLMDLWFGLNESEFAKEKKILVAKHFITKQINPKYTELTNDVYTEDKGFVNGQSIDNQNFKIIDDLISKKVKLCHKAIDGRSLGGSLVPRGSGGSAAAYNKTLDCIDVNKEDLYFISDKEGFENIDFSEPEIRYDSNVTTATTSSFTDHFLVNRTFNDSDRFPPVELEYAIEPAEIVDNTIMPDIDQKSEISLDNLTTFHYLNAQKMDLGFDSSKEQLKMVTSIEESLLDSKKVYTPFTRTAHSVNERISGIAESYLFYQWLKTVINDFTDELNQKSNTDKVADISWIIPYVGPALNIGLDLSHGDFTKAFEDLGVSILFAIAPEFATISLVALSIYENIEEDSQKEKVINKVENTLARRIEKWHQVYAFMVAQWWGMVHTQIDTRIHQMYESLSHQIIAIKANMEYQLSHYKGPDNDKLLLKDYIYEAEIALNTSANRAMKNIERFMIESSISYLKNNLIPSVVENLKKFDADTKKNLDQFIDKNSSVLGSDLHILKSQVDLELNPTTKVAFNIQSIPDFDINALIDRLGIQINDSKILSLQNRKNTLVDTSGYNAEVSEEGDVQLNPIFPFDFKLGSSGEDRGKVIVTQNENIVYNSMYESFSISFWIRINKWVSNLPGYTIIDSVKNNSGWSIGIISNFLVFTLKQNEDSEQSINFSYDISNNAPGYNKWFFVTVTNNMMGNMKIYINGKLIDTIKVKELTGINFSKTITFEINKIPDTGLITSDSDNINMWIRDFYIFAKELDGKDINILFNSLQYTNVVKDYWGNDLRYNKEYYMVNIDYLNRYMYANSRQIVFNTRRNNNDFNEGYKIIIKRIRGNTNDTRVRGGDILYFDMTINNKAYNLFMKNETMYADNHSTEDIYAIGLREQTKDINDNIIFQIQPMNNTYYYASQIFKSNFNGENISGICSIGTYRFRLGGDWYRHNYLVPTVKQGNYASLLESTSTHWGFVPVSE

SEQ ID NO: 99 - protein, 1267 aa, Artificial Sequence
  Synthetic
MLQIRVFNYNDPIDGENIVELRYHNRSPVKAFQIVDGIWIIPERYNFTNDTKKVPDDRALTILEDEVFAVRENDYLTTDVNEKNSFLNNITKLFKRINSSNIGNQLLNYISTSVPYPVVSTNSIKARDYNTIKFDSIDGRRITKSANVLIYGPSMKNLLDKQTRAINGEEAKNGIGCLSDIIFSPNYLSVQTVSSSRFVEDPASSLTHQLIHALHNLYGIQYPGEEKFKFGGFIDKLLGTRECIDYEEVLTYGGKDSEIIRKKIDKSLYPDDFVNKYGEMYKRIKGSNPYYPDEKKLKQSFLNRMNPFDQNGTFDTKEFKNHLMDLWFGLNESEFAKEKKILVAKHFITKQINPKYTELTNDVYTEDKGFVNGQSIDNQNFKIIDDLISKKVKLCHKAIDGRSLGGSLVPRGSGGSAAAYNKTLDCIDVNKEDLYFISDKEGFENIDFSEPEIRYDSNVTTATTSSFTDHFLVNRTFNDSDRFPPVELEYAIEPAEIVDNTIMPDIDQKSEISLDNLTTFHYLNAQKMDLGFDSSKEQLKMVTSIEESLLDSKKVYTPFTRTAHSVNERISGIAESYLFYQWLKTVINDFTDELNQKSNTDKVADISWIIPYVGPALNIGLDLSHGDFTKAFEDLGVSILFAIAPEFATISLVALSIYENIEEDSQKEKVINKVENTLARRIEKWHQVYAFMVAQWWGMVHTQIDTRIHQMYESLSHQIIAIKANMEYQLSHYKGPDNDKLLLKDYIYEAEIALNTSANRAMKNIERFMIESSISYLKNNLIPSVVENLKKFDADTKKNLDQFIDKNSSVLGSDLHILKSQVDLELNPTTKVAFNIQSIPDFDINALIDRLGIQINDSKILSLQNKKNALVDTSGYNAEVRVGDNVQLNTIYTNDFKLSSSGDKIIVNLNNNILYSAIYENSSVSFWIKISKDLTNSHNEYTIINSIEQNSGWKLCIRNGNIEWILQDVNRKYKSLIFDYSESLSHTGYTNKWFFVTITNNIMGYMKLYINGELKQSQKIEDLDEVKLDKTIVFGIDENIDENQMLWIRDFNIFSKELSNEDINIVYEGQILRNVIKDYWGNPLKFDTEYYIINDNYIDRYIAPESNVLVLVQYPDRSKLYTGNPITIKSVSDKNPYSRILNGDNIILHMLYNSRKYMIIRDTDTIYATQGGECSQNCVYALKLQSNLGNYGIGIFSIKNIVSKNKYCSQIFSSFRENTMLLADIYKPWRFSFKNAYTPVAVTNYETKLLSTSSFWKFISRDPGWVE

SEQ ID NO: 100 - protein, 1260 aa, Artificial Sequence
  Synthetic
MLQIRVFNYNDPIDGENIVELRYHNRSPVKAFQIVDGIWIIPERYNFTNDTKKVPDDRALTILEDEVFAVRENDYLTTDVNEKNSFLNNITKLFKRINSSNIGNQLLNYISTSVPYPVVSTNSIKARDYNTIKFDSIDGRRITKSANVLIYGPSMKNLLDKQTRAINGEEAKNGIGCLSDIIFSPNYLSVQTVSSSRFVEDPASSLTHQLIHALHNLYGIQYPGEEKFKFGGFIDKLLGTRECIDYEEVLTYGGKDSEIIRKKIDKSLYPDDFVNKYGEMYKRIKGSNPYYPDEKKLKQSFLNRMNPFDQNGTFDTKEFKNHLMDLWFGLNESEFAKEKKILVAKHFITKQINPKYTELTNDVYTEDKGFVNGQSIDNQNFKIIDDLISKKVKLCHKAIDGRSLGGSLVPRGSGGSAAAYNKTLDCIDVNKEDLYFISDKEGFENIDFSEPEIRYDSNVTTATTSSFTDHFLVNRTFNDSDRFPPVELEYAIEPAEIVDNTIMPDIDQKSEISLDNLTTFHYLNAQKMDLGFDSSKEQLKMVTSIEESLLDSKKVYTPFTRTAHSVNERISGIAESYLFYQWLKTVINDFTDELNQKSNTDKVADISWIIPYVGPALNIGLDLSHGDFTKAFEDLGVSILFAIAPEFATISLVALSIYENIEEDSQKEKVINKVENTLARRIEKWHQVYAFMVAQWWGMVHTQIDTRIHQMYESLSHQIIAIKANMEYQLSHYKGPDNDKLLLKDYIYEAEIALNTSANRAMKNIERFMIESSISYLKNNLIPSVVENLKKFDADTKKNLDQFIDKNSSVLGSDLHILKSQVDLELNPTTKVAFNIQSIPDFDINALIDRLGIQIKSSSVLNMRYKNDKYVDTSGYDSNININGDVYKYPTNKNQFGIYNDKLSEVNISQNDYIIYDNKYKNFSISFWVRIPNYDNKIVNVNNEYTIINCMRDNNSGWKVSLNHNEIIWTLQDNAGINQKLAFNYGNANGISDYINKWIFVTITNDRLGDSKLYINGNLIDQKSILNLGNIHVSDNILFKIVNCSYTRYIGIRYFNIFDKELDETEIQTLYSNEPNTNILKDFWGNYLLYDKEYYLLNVLKPNNFIDRRKDSTLSINNIRSTILLANRLYSGIKVKIQRVNNSSTNDNLVRKNDQVYINFVASKTHLFPLYADTATTNKEKTIKISSSGNRFNQVVVMNSVGNNCTMNFKNNNGNNIGLLGFKADTVVASTWYYTHMRDHTNSNGCFWNFISEEHGWQEK

SEQ ID NO: 101 - protein, 1267 aa, Artificial Sequence
  Synthetic
MLQIRVFNYNDPIDGENIVELRYHNRSPVKAFQIVDGIWIIPERYNFTNDTKKVPDDRALTILEDEVFAVRENDYLTTDVNEKNSFLNNITKLFKRINSSNIGNQLLNYISTSVPYPVVSTNSIKARDYNTIKFDSIDGRRITKSANVLIYGPSMKNLLDKQTRAINGEEAKNGIGCLSDIIFSPNYLSVQTVSSSRFVEDPASSLTHQLIHALHNLYGIQYPGEEKFKFGGFIDKLLGTRECIDYEEVLTYGGKDSEIIRKKIDKSLYPDDFVNKYGEMYKRIKGSNPYYPDEKKLKQSFLNRMNPFDQNGTFDTKEFKNHLMDLWFGLNESEFAKEKKILVAKHFITKQINPKYTELTNDVYTEDKGFVNGQSIDNQNFKIIDDLISKKVKLCHKAIDGRSLGGSLVPRGSGGSAAAYNKTLDCIDVNKEDLYFISDKEGFENIDFSEPEIRYDSNVTTATTSSFTDHFLVNRTFNDSDRFPPVELEYAIEPAEIVDNTIMPDIDQKSEISLDNLTTFHYLNAQKMDLGFDSSKEQLKMVTSIEESLLDSKKVYTPFTRTAHSVNERISGIAESYLFYQWLKTVINDFTDELNQKSNTDKVADISWIIPYVGPALNIGLDLSHGDFTKAFEDLGVSILFAIAPEFATISLVALSIYENIEEDSQKEKVINKVENTLARRIEKWHQVYAFMVAQWWGMVHTQIDTRIHQMYESLSHQIIAIKANMEYQLSHYKGPDNDKLLLKDYIYEAEIALNTSANRAMKNIERFMIESSISYLKNNLIPSVVENLKKFDADTKKNLDQFIDKNSSVLGSDLHILKSQVDLELNPTTKVAFNIQSIPDFDINALIDRLGIQIKDNSILDMRYENNKFIDISGYGSNISINGDVYIYSTNRNQFGIYSSKPSEVNIAQNNDIIYNGRYQNFSISFWVRIPKYFNKVNLNNEYTIIDCIRNNNSGWKISLNYNKIIWTLQDTAGNNQKLVFNYTQMISISDYINKWIFVTITNNRLGNSRIYINGNLIDEKSISNLGDIHVSDNILFKIVGCNDTRYVGIRYFKVFDTELGKTEIETLYSDEPDPSILKDFWGNYLLYNKRYYLLNLLRTDKSITQNSNFLNINQQRGVYQKPNIFSNTRLYTGVEVIIRKNGSTDISNTDNFVRKNDLAYINVVDRDVEYRLYADISIAKPEKIIKLIRTSNSNNSLGQIIVMDSIGNNCTMNFQNNNGGNIGLLGFHSNNLVASSWYYNNIRKNTSSNGCFWSFISKEHGWQEN

SEQ ID NO: 102 - protein, 1287 aa, Artificial Sequence
  Synthetic
MLQIRVFNYNDPIDGENIVELRYHNRSPVKAFQIVDGIWIIPERYNFTNDTKKVPDDRALTILEDEVFAVRENDYLTTDVNEKNSFLNNITKLFKRINSSNIGNQLLNYISTSVPYPVVSTNSIKARDYNTIKFDSIDGRRITKSANVLIYGPSMKNLLDKQTRAINGEEAKNGIGCLSDIIFSPNYLSVQTVSSSRFVEDPASSLTHQLIHALHNLYGIQYPGEEKFKFGGFIDKLLGTRECIDYEEVLTYGGKDSEIIRKKIDKSLYPDDFVNKYGEMYKRIKGSNPYYPDEKKLKQSFLNRMNPFDQNGTFDTKEFKNHLMDLWFGLNESEFAKEKKILVAKHFITKQINPKYTELTNDVYTEDKGFVNGQSIDNQNFKIIDDLISKKVKLCHKAIDGRSLGGSLVPRGSGGSAAAYNKTLDCIDVNKEDLYFISDKEGFENIDFSEPEIRYDSNVTTATTSSFTDHFLVNRTFNDSDRFPPVELEYAIEPAEIVDNTIMPDIDQKSEISLDNLTTFHYLNAQKMDLGFDSSKEQLKMVTSIEESLLDSKKVYTPFTRTAHSVNERISGIAESYLFYQWLKTVINDFTDELNQKSNTDKVADISWIIPYVGPALNIGLDLSHGDFTKAFEDLGVSILFAIAPEFATISLVALSIYENIEEDSQKEKVINKVENTLARRIEKWHQVYAFMVAQWWGMVHTQIDTRIHQMYESLSHQIIAIKANMEYQLSHYKGPDNDKLLLKDYIYEAEIALNTSANRAMKNIERFMIESSISYLKNNLIPSVVENLKKFDADTKKNLDQFIDKNSSVLGSDLHILKSQVDLELNPTTKVAFNIQSIPDFDINALIDRLGIQISSNAILSLSYRGGRLIDSSGYGATMNVGSDVIFNDIGNGQFKLNNSENSNITAHQSKFVVYDSMFDNFSINFWVRTPKYNNNDIQTYLQNEYTIISCIKNDSGWKVSIKGNRIIWTLIDVNAKSKSIFFEYSIKDNISDYINKWFSITITNDRLGNANIYINGSLKKSEKILNLDRINSSNDIDFKLINCTDTTKFVWIKDFNIFGRELNATEVSSLYWIQSSTNTLKDFWGNPLRYDTQYYLFNQGMQNIYIKYFSKASMGETAPRTNFNNAAINYQNLYLGLRFIIKKASNSRNINNDNIVREGDYIYLNIDNISDESYRVYVLVNSKEIQTQLFLAPINDDPTFYDVLQIKKYYEKTTYNCQILCEKDTKTFGLFGIGKFVKDYGYVWDTYDNYFCISQWYLRRISENINKLRLGCNWQFIPVDEGWTE

SEQ ID NO: 103 - protein, 1282 aa, Artificial Sequence
  Synthetic
MLQIRVFNYNDPIDGENIVELRYHNRSPVKAFQIVDGIWIIPERYNFTNDTKKVPDDRALTILEDEVFAVRENDYLTTDVNEKNSFLNNITKLFKRINSSNIGNQLLNYISTSVPYPVVSTNSIKARDYNTIKFDSIDGRRITKSANVLIYGPSMKNLLDKQTRAINGEEAKNGIGCLSDIIFSPNYLSVQTVSSSRFVEDPASSLTHQLIHALHNLYGIQYPGEEKFKFGGFIDKLLGTRECIDYEEVLTYGGKDSEIIRKKIDKSLYPDDFVNKYGEMYKRIKGSNPYYPDEKKLKQSFLNRMNPFDQNGTFDTKEFKNHLMDLWFGLNESEFAKEKKILVAKHFITKQINPKYTELTNDVYTEDKGFVNGQSIDNQNFKIIDDLISKKVKLCHKAIDGRSLGGSLVPRGSGGSAAAYNKTLDCIDVNKEDLYFISDKEGFENIDFSEPEIRYDSNVTTATTSSFTDHFLVNRTFNDSDRFPPVELEYAIEPAEIVDNTIMPDIDQKSEISLDNLTTFHYLNAQKMDLGFDSSKEQLKMVTSIEESLLDSKKVYTPFTRTAHSVNERISGIAESYLFYQWLKTVINDFTDELNQKSNTDKVADISWIIPYVGPALNIGLDLSHGDFTKAFEDLGVSILFAIAPEFATISLVALSIYENIEEDSQKEKVINKVENTLARRIEKWHQVYAFMVAQWWGMVHTQIDTRIHQMYESLSHQIIAIKANMEYQLSHYKGPDNDKLLLKDYIYEAEIALNTSANRAMKNIERFMIESSISYLKNNLIPSVVENLKKFDADTKKNLDQFIDKNSSVLGSDLHILKSQVDLELNPTTKVAFNIQSIPDFDINALIDRLGIQLKYNCILNIKYEMDRDKLVDSSGYRSRINIGTGVKFSEIDKNQVQLSNLESSKIEVILNNGVIYNSMYENFSTSFWIRIPKYFRNINNEYKIISCMQNNSGWEVSLNFSNMNSKIIWTLQDTEGIKKTVVFQYTQNINISDYINRWIFVTITNNRLSNSKIYINGRLINEESISDLGNIHASNNIMFKLDGCRDPHRYIWIKYFNLFDKELNKKEIKDLYDNQSNSGILKDFWGDYLQYDKPYYMLNLYDPNKYLDVNNVGIRGYMYLKGPRGRIVTTNIYLNSTLYMGTKFIIKKYASGNKDNIVRNNDRVYINVVVKNKEYRLATNASQAGVEKILSAVEIPDVGNLSQVVVMKSENDQGIRNKCKMNLQDNNGNDIGFIGFHQFNNIAKLVASNWYNRQIGKASRTFGCSWEFIPVDDGWGESSL

SEQ ID NO: 104 - protein, 394 aa, Artificial Sequence
  Synthetic
MLQIRVFNYNDPIDGENIVELRYHNRSPVKAFQIVDGIWIIPERYNFTNDTKKVPDDRALTILEDEVFAVRENDYLTTDVNEKNSFLNNITKLFKRINSSNIGNQLLNYISTSVPYPVVSTNSIKARDYNTIKFDSIDGRRITKSANVLIYGPSMKNLLDKQTRAINGEEAKNGIGCLSDIIFSPNYLSVQTVSSSRFVEDPASSLTHQLIHALHNLYGIQYPGEEKFKFGGFIDKLLGTRECIDYEEVLTYGGKDSEIIRKKIDKSLYPDDFVNKYGEMYKRIKGSNPYYPDEKKLKQSFLNRMNPFDQNGTFDTKEFKNHLMDLWFGLNESEFAKEKKILVAKHFITKQINPKYTELTNDVYTEDKGFVNGQSIDNQNFKIIDDLISKKVKL

SEQ ID NO: 105 - protein, 853 aa, Artificial Sequence
  Synthetic
IDVNKEDLYFISDKEGFENIDFSEPEIRYDSNVTTATTSSFTDHFLVNRTFNDSDRFPPVELEYAIEPAEIVDNTIMPDIDQKSEISLDNLTTFHYLNAQKMDLGFDSSKEQLKMVTSIEESLLDSKKVYTPFTRTAHSVNERISGIAESYLFYQWLKTVINDFTDELNQKSNTDKVADISWIIPYVGPALNIGLDLSHGDFTKAFEDLGVSILFAIAPEFATISLVALSIYENIEEDSQKEKVINKVENTLARRIEKWHQVYAFMVAQWWGMVHTQIDTRIHQMYESLSHQIIAIKANMEYQLSHYKGPDNDKLLLKDYIYEAEIALNTSANRAMKNIERFMIESSISYLKNNLIPSVVENLKKFDADTKKNLDQFIDKNSSVLGSDLHILKSQVDLELNPTTKVAFNIQSIPDFDINALIDRLGIQIINTSILNLRYESNHLIDLSRYASKINIGSKVNFDPIDKNQIQLFNLESSKIEVILKNAIVYNSMYENFSTSFWIRIPKYFNSISLNNEYTIINCMENNSGWKVSLNYGEIIWTLQDTQEIKQRVVFKYSQMINISDYINRWIFVTITNNRLNNSKIYINGRLIDQKPISNLGNIHASNNIMFKLDGCRDTHRYIWIKYFNLFDKELNEKEIKDLYDNQSNSGILKDFWGDYLQYDKPYYMLNLYDPNKYVDVNNVGIRGYMYLKGPRGSVMTTNIYLNSSLYRGTKFIIKKYASGNKDNIVRNNDRVYINVVVKNKEYRLATNASQAGVEKILSALEIPDVGNLSQVVVMKSKNDQGITNKCKMNLQDNNGNDIGFIGFHQFNNIAKLVASNWYNRQIERSSRTLGCSWEFIPVDDGWGERPLQ

SEQ ID NO: 106 - protein, 860 aa, Artificial Sequence
  Synthetic
IDVNKEDLYFISDKEGFENIDFSEPEIRYDSNVTTATTSSFTDHFLVNRTFNDSDRFPPVELEYAIEPAEIVDNTIMPDIDQKSEISLDNLTTFHYLNAQKMDLGFDSSKEQLKMVTSIEESLLDSKKVYTPFTRTAHSVNERISGIAESYLFYQWLKTVINDFTDELNQKSNTDKVADISWIIPYVGPALNIGLDLSHGDFTKAFEDLGVSILFAIAPEFATISLVALSIYENIEEDSQKEKVINKVENTLARRIEKWHQVYAFMVAQWWGMVHTQIDTRIHQMYESLSHQIIAIKANMEYQLSHYKGPDNDKLLLKDYIYEAEIALNTSANRAMKNIERFMIESSISYLKNNLIPSVVENLKKFDADTKKNLDQFIDKNSSVLGSDLHILKSQVDLELNPTTKVAFNIQSIPDFDINALIDRLGIQILNNIILNLRYKDNNLIDLSGYGAKVEVYDGVELNDKNQFKLTSSANSKIRVTQNQNIIFNSVFLDFSVSFWIRIPKYKNDGIQNYIHNEYTIINCMKNNSGWKISIRGNRIIWTLIDINGKTKSVFFEYNIREDISEYINRWFFVTITNNLNNAKIYINGKLESNTDIKDIREVIANGEIIFKLDGDIDRTQFIWMKYFSIFNTELSQSNIEERYKIQSYSEYLKDFWGNPLMYNKEYYMFNAGNKNSYIKLKKDSPVGEILTRSKYNQNSKYINYRDLYIGEKFIIRRKSNSQSINDDIVRKEDYIYLDFFNLNQEWRVYTYKYFKKEEEKLFLAPISDSDEFYNTIQIKEYDEQPTYSCQLLFKKDEESTDEIGLIGIHRFYESGIVFEEYKDYFCISKWYLKEVKRKPYNLKLGCNWQFIPKDEGWTE

SEQ ID NO: 107 - protein, 852 aa, Artificial Sequence
  Synthetic
IDVNKEDLYFISDKEGFENIDFSEPEIRYDSNVTTATTSSFTDHFLVNRTFNDSDRFPPVELEYAIEPAEIVDNTIMPDIDQKSEISLDNLTTFHYLNAQKMDLGFDSSKEQLKMVTSIEESLLDSKKVYTPFTRTAHSVNERISGIAESYLFYQWLKTVINDFTDELNQKSNTDKVADISWIIPYVGPALNIGLDLSHGDFTKAFEDLGVSILFAIAPEFATISLVALSIYENIEEDSQKEKVINKVENTLARRIEKWHQVYAFMVAQWWGMVHTQIDTRIHQMYESLSHQIIAIKANMEYQLSHYKGPDNDKLLLKDYIYEAEIALNTSANRAMKNIERFMIESSISYLKNNLIPSVVENLKKFDADTKKNLDQFIDKNSSVLGSDLHILKSQVDLELNPTTKVAFNIQSIPDFDINALIDRLGIQINDSKILSLQNRKNTLVDTSGYNAEVSEEGDVQLNPIFPFDFKLGSSGEDRGKVIVTQNENIVYNSMYESFSISFWIRINKWVSNLPGYTIIDSVKNNSGWSIGIISNFLVFTLKQNEDSEQSINFSYDISNNAPGYNKWFFVTVTNNMMGNMKIYINGKLIDTIKVKELTGINFSKTITFEINKIPDTGLITSDSDNINMWIRDFYIFAKELDGKDINILFNSLQYTNVVKDYWGNDLRYNKEYYMVNIDYLNRYMYANSRQIVFNTRRNNNDFNEGYKIIIKRIRGNTNDTRVRGGDILYFDMTINNKAYNLFMKNETMYADNHSTEDIYAIGLREQTKDINDNIIFQIQPMNNTYYYASQIFKSNFNGENISGICSIGTYRFRLGGDWYRHNYLVPTVKQGNYASLLESTSTHWGFVPVSE

SEQ ID NO: 108 - protein, 841 aa, Artificial Sequence
  Synthetic
IDVNKEDLYFISDKEGFENIDFSEPEIRYDSNVTTATTSSFTDHFLVNRTFNDSDRFPPVELEYAIEPAEIVDNTIMPDIDQKSEISLDNLTTFHYLNAQKMDLGFDSSKEQLKMVTSIEESLLDSKKVYTPFTRTAHSVNERISGIAESYLFYQWLKTVINDFTDELNQKSNTDKVADISWIIPYVGPALNIGLDLSHGDFTKAFEDLGVSILFAIAPEFATISLVALSIYENIEEDSQKEKVINKVENTLARRIEKWHQVYAFMVAQWWGMVHTQIDTRIHQMYESLSHQIIAIKANMEYQLSHYKGPDNDKLLLKDYIYEAEIALNTSANRAMKNIERFMIESSISYLKNNLIPSVVENLKKFDADTKKNLDQFIDKNSSVLGSDLHILKSQVDLELNPTTKVAFNIQSIPDFDINALIDRLGIQINDSKILSLQNKKNALVDTSGYNAEVRVGDNVQLNTIYTNDFKLSSSGDKIIVNLNNNILYSAIYENSSVSFWIKISKDLTNSHNEYTIINSIEQNSGWKLCIRNGNIEWILQDVNRKYKSLIFDYSESLSHTGYTNKWFFVTITNNIMGYMKLYINGELKQSQKIEDLDEVKLDKTIVFGIDENIDENQMLWIRDFNIFSKELSNEDINIVYEGQILRNVIKDYWGNPLKFDTEYYIINDNYIDRYIAPESNVLVLVQYPDRSKLYTGNPITIKSVSDKNPYSRILNGDNIILHMLYNSRKYMIIRDTDTIYATQGGECSQNCVYALKLQSNLGNYGIGIFSIKNIVSKNKYCSQIFSSFRENTMLLADIYKPWRFSFKNAYTPVAVTNYETKLLSTSSFWKFISRDPGWVE

SEQ ID NO: 109 - protein, 834 aa, Artificial Sequence
  Synthetic
IDVNKEDLYFISDKEGFENIDFSEPEIRYDSNVTTATTSSFTDHFLVNRTFNDSDRFPPVELEYAIEPAEIVDNTIMPDIDQKSEISLDNLTTFHYLNAQKMDLGFDSSKEQLKMVTSIEESLLDSKKVYTPFTRTAHSVNERISGIAESYLFYQWLKTVINDFTDELNQKSNTDKVADISWIIPYVGPALNIGLDLSHGDFTKAFEDLGVSILFAIAPEFATISLVALSIYENIEEDSQKEKVINKVENTLARRIEKWHQVYAFMVAQWWGMVHTQIDTRIHQMYESLSHQIIAIKANMEYQLSHYKGPDNDKLLLKDYIYEAEIALNTSANRAMKNIERFMIESSISYLKNNLIPSVVENLKKFDADTKKNLDQFIDKNSSVLGSDLHILKSQVDLELNPTTKVAFNIQSIPDFDINALIDRLGIQIKSSSVLNMRYKNDKYVDTSGYDSNININGDVYKYPTNKNQFGIYNDKLSEVNISQNDYIIYDNKYKNFSISFWVRIPNYDNKIVNVNNEYTIINCMRDNNSGWKVSLNHNEIIWTLQDNAGINQKLAFNYGNANGISDYINKWIFVTITNDRLGDSKLYINGNLIDQKSILNLGNIHVSDNILFKIVNCSYTRYIGIRYFNIFDKELDETEIQTLYSNEPNTNILKDFWGNYLLYDKEYYLLNVLKPNNFIDRRKDSTLSINNIRSTILLANRLYSGIKVKIQRVNNSSTNDNLVRKNDQVYINFVASKTHLFPLYADTATTNKEKTIKISSSGNRFNQVVVMNSVGNNCTMNFKNNNGNNIGLLGFKADTVVASTWYYTHMRDHTNSNGCFWNFISEEHGWQEK

SEQ ID NO: 110 - protein, 841 aa, Artificial Sequence
  Synthetic
IDVNKEDLYFISDKEGFENIDFSEPEIRYDSNVTTATTSSFTDHFLVNRTFNDSDRFPPVELEYAIEPAEIVDNTIMPDIDQKSEISLDNLTTFHYLNAQKMDLGFDSSKEQLKMVTSIEESLLDSKKVYTPFTRTAHSVNERISGIAESYLFYQWLKTVINDFTDELNQKSNTDKVADISWIIPYVGPALNIGLDLSHGDFTKAFEDLGVSILFAIAPEFATISLVALSIYENIEEDSQKEKVINKVENTLARRIEKWHQVYAFMVAQWWGMVHTQIDTRIHQMYESLSHQIIAIKANMEYQLSHYKGPDNDKLLLKDYIYEAEIALNTSANRAMKNIERFMIESSISYLKNNLIPSVVENLKKFDADTKKNLDQFIDKNSSVLGSDLHILKSQVDLELNPTTKVAFNIQSIPDFDINALIDRLGIQIKDNSILDMRYENNKFIDISGYGSNISINGDVYIYSTNRNQFGIYSSKPSEVNIAQNNDIIYNGRYQNFSISFWVRIPKYFNKVNLNNEYTIIDCIRNNNSGWKISLNYNKIIWTLQDTAGNNQKLVFNYTQMISISDYINKWIFVTITNNRLGNSRIYINGNLIDEKSISNLGDIHVSDNILFKIVGCNDTRYVGIRYFKVFDTELGKTEIETLYSDEPDPSILKDFWGNYLLYNKRYYLLNLLRTDKSITQNSNFLNINQQRGVYQKPNIFSNTRLYTGVEVIIRKNGSTDISNTDNFVRKNDLAYINVVDRDVEYRLYADISIAKPEKIIKLIRTSNSNNSLGQIIVMDSIGNNCTMNFQNNNGGNIGLLGFHSNNLVASSWYYNNIRKNTSSNGCFWSFISKEHGWQEN

SEQ ID NO: 111 - protein, 861 aa, Artificial Sequence
  Synthetic
IDVNKEDLYFISDKEGFENIDFSEPEIRYDSNVTTATTSSFTDHFLVNRTFNDSDRFPPVELEYAIEPAEIVDNTIMPDIDQKSEISLDNLTTFHYLNAQKMDLGFDSSKEQLKMVTSIEESLLDSKKVYTPFTRTAHSVNERISGIAESYLFYQWLKTVINDFTDELNQKSNTDKVADISWIIPYVGPALNIGLDLSHGDFTKAFEDLGVSILFAIAPEFATISLVALSIYENIEEDSQKEKVINKVENTLARRIEKWHQVYAFMVAQWWGMVHTQIDTRIHQMYESLSHQIIAIKANMEYQLSHYKGPDNDKLLLKDYIYEAEIALNTSANRAMKNIERFMIESSISYLKNNLIPSVVENLKKFDADTKKNLDQFIDKNSSVLGSDLHILKSQVDLELNPTTKVAFNIQSIPDFDINALIDRLGIQISSNAILSLSYRGGRLIDSSGYGATMNVGSDVIFNDIGNGQFKLNNSENSNITAHQSKFVVYDSMFDNFSINFWVRTPKYNNNDIQTYLQNEYTIISCIKNDSGWKVSIKGNRIIWTLIDVNAKSKSIFFEYSIKDNISDYINKWFSITITNDRLGNANIYINGSLKKSEKILNLDRINSSNDIDFKLINCTDTTKFVWIKDFNIFGRELNATEVSSLYWIQSSTNTLKDFWGNPLRYDTQYYLFNQGMQNIYIKYFSKASMGETAPRTNFNNAAINYQNLYLGLRFIIKKASNSRNINNDNIVREGDYIYLNIDNISDESYRVYVLVNSKEIQTQLFLAPINDDPTFYDVLQIKKYYEKTTYNCQILCEKDTKTFGLFGIGKFVKDYGYVWDTYDNYFCISQWYLRRISENINKLRLGCNWQFIPVDEGWTE

SEQ ID NO: 112 - protein, 856 aa, Artificial Sequence
  Synthetic
IDVNKEDLYFISDKEGFENIDFSEPEIRYDSNVTTATTSSFTDHFLVNRTFNDSDRFPPVELEYAIEPAEIVDNTIMPDIDQKSEISLDNLTTFHYLNAQKMDLGFDSSKEQLKMVTSIEESLLDSKKVYTPFTRTAHSVNERISGIAESYLFYQWLKTVINDFTDELNQKSNTDKVADISWIIPYVGPALNIGLDLSHGDFTKAFEDLGVSILFAIAPEFATISLVALSIYENIEEDSQKEKVINKVENTLARRIEKWHQVYAFMVAQWWGMVHTQIDTRIHQMYESLSHQIIAIKANMEYQLSHYKGPDNDKLLLKDYIYEAEIALNTSANRAMKNIERFMIESSISYLKNNLIPSVVENLKKFDADTKKNLDQFIDKNSSVLGSDLHILKSQVDLELNPTTKVAFNIQSIPDFDINALIDRLGIQLKYNCILNIKYEMDRDKLVDSSGYRSRINIGTGVKFSEIDKNQVQLSNLESSKIEVILNNGVIYNSMYENFSTSFWIRIPKYFRNINNEYKIISCMQNNSGWEVSLNFSNMNSKIIWTLQDTEGIKKTVVFQYTQNINISDYINRWIFVTITNNRLSNSKIYINGRLINEESISDLGNIHASNNIMFKLDGCRDPHRYIWIKYFNLFDKELNKKEIKDLYDNQSNSGILKDFWGDYLQYDKPYYMLNLYDPNKYLDVNNVGIRGYMYLKGPRGRIVTTNIYLNSTLYMGTKFIIKKYASGNKDNIVRNNDRVYINVVVKNKEYRLATNASQAGVEKILSAVEIPDVGNLSQVVVMKSENDQGIRNKCKMNLQDNNGNDIGFIGFHQFNNIAKLVASNWYNRQIGKASRTFGCSWEFIPVDDGWGESSL

SEQ ID NO: 113 - protein, 135 aa, Artificial Sequence
  Synthetic
QLQLVESGGGMVQPGGSLRLSCAASGFTFSTYDMSWVRQAPGKGPEWVSIINAGGGSTYYAASVKGRFAISRDNAKNTLYLQMNNLKPEDTALYYCARVASYYCRGYVCSPPEFDYWGQGTQVTVSSEPKTPKPQ

SEQ ID NO: 114 - protein, 125 aa, Artificial Sequence
  Synthetic
QVQLVESGGGLVQSGGSLRLSCAASGSIDSLYHMGWYRQAPGKERELVARVQDGGSTAYKDSVKGRFTISRDFSRSTMYLQMNSLKPEDTAIYYCAAKSTISTPLSWGQGTQVTVSSEPKTPKPQ

SEQ ID NO: 115 - skipped

SEQ ID NO: 116 - protein, 399 aa, Artificial Sequence
  Synthetic
MSDKIIHLTDDSFDTDVLKADGAILVDFWAEWCGPCKMIAPILDEIADEYQGKLTVAKLNIDQNPGTAPKYGIRGIPTLLLFKNGEVAATKVGALSKGQLKEFLDANLAGGSLVPRGSGGSQLQLVESGGGMVQPGGSLRLSCAASGFTFSTYDMSWVRQAPGKGPEWVSIINAGGGSTYYAASVKGRFAISRDNAKNTLYLQMNNLKPEDTALYYCARVASYYCRGYVCSPPEFDYWGQGTQVTVSSEPKTPKPQGGGGSGGGGEFMGTQVQLVESGGGLVQPGGSLRLSCAASGSIFSIYAMGWYRQAPGKQRELVAAISSYGSTNYADSVKGRFTISRDNAKNTVYLQMNSLKPEDTAVYYCNADIATMTAVGGFDYWGQGTQVTVSSEPKTPKPQ

SEQ ID NO: 117 - protein, 389 aa, Artificial Sequence
  Synthetic
MSDKIIHLTDDSFDTDVLKADGAILVDFWAEWCGPCKMIAPILDEIADEYQGKLTVAKLNIDQNPGTAPKYGIRGIPTLLLFKNGEVAATKVGALSKGQLKEFLDANLAGGSLVPRGSGGSQVQLVESGGGLVQSGGSLRLSCAASGSIDSLYHMGWYRQAPGKERELVARVQDGGSTAYKDSVKGRFTISRDFSRSTMYLQMNSLKPEDTAIYYCAAKSTISTPLSWGQGTQVTVSSEPKTPKPQGGGGSGGGGEFMGTQVQLVESGGGLVQPGGSLRLSCAASGSIFSIYAMGWYRQAPGKQRELVAAISSYGSTNYADSVKGRFTISRDNAKNTVYLQMNSLKPEDTAVYYCNADIATMTAVGGFDYWGQGTQVTVSSEPKTPKPQ

SEQ ID NO: 118 - protein, 390 aa, Artificial Sequence
  Synthetic
MSDKIIHLTDDSFDTDVLKADGAILVDFWAEWCGPCKMIAPILDEIADEYQGKLTVAKLNIDQNPGTAPKYGIRGIPTLLLFKNGEVAATKVGALSKGQLKEFLDANLAGGSLVPRGSGGSQVQLVESGGGLVQPGGSLRLSCAASGFPFHAYYMSWVRQAPGKGLEWVSHIGNGGIITRYADSVKGRFTISRDNAKNTLYLQMTNLKPEDTALYYCTLGTRDDLGPERGQGTQVTVSSEPKTPKPQGGGGSGGGGEFMGTQVQLVESGGGLVQPGGSLRLSCAASGSIFSIYAMGWYRQAPGKQRELVAAISSYGSTNYADSVKGRFTISRDNAKNTVYLQMNSLKPEDTAVYYCNADIATMTAVGGFDYWGQGTQVTVSSEPKTPKPQ

SEQ ID NO: 119 - protein, 1738 aa, Artificial Sequence
  Synthetic
MSDKIIHLTDDSFDTDVLKADGAILVDFWAEWCGPCKMIAPILDEIADEYQGKLTVAKLNIDQNPGTAPKYGIRGIPTLLLFKNGEVAATKVGALSKGQLKEFLDANLAGGSLVPRGSGGSQVQLVESGGGLVQPGGSLRLSCAASGFPFHAYYMSWVRQAPGKGLEWVSHIGNGGIITRYADSVKGRFTISRDNAKNTLYLQMTNLKPEDTALYYCTLGTRDDLGPERGQGTQVTVSSEPKTPKPQGGGGSGGGGEFMGTQVQLVESGGGLVQPGGSLRLSCAASGSIFSIYAMGWYRQAPGKQRELVAAISSYGSTNYADSVKGRFTISRDNAKNTVYLQMNSLKPEDTAVYYCNADIATMTAVGGFDYWGQGTQVTVSSEPKTPKPQGGGGSGGGGSKLMKLEINKFNYNDPIDGINVITMRPPRHSDKINKGKGPFKAFQVIKNIWIVPERYNFTNNTNDLNIPSEPIMEADAIYNPNYLNTPSEKDEFLQGVIKVLERIKSKPEGEKLLELISSSIPLPLVSNGALTLSDNETIAYQENNNIVSNLQANLVIYGPGPDIANNATYGLYSTPISNGEGTLSEVSFSPFYLKPFDESYGNYRSLVNIVNKFVKREFAPDPASTLMHQLVHVTHNLYGISNRNFYYNFDTGKIETSRQQNSLIFEELLTFGGIDSKAISSLIIKKIIETAKNNYTTLISERLNTVTVENDLLKYIKNKIPVQGRLGNFKLDTAEFEKKLNTILFVLNESNLAQRFSILVAKHFLKERPIDPIYVNILDDNSYSTLEGFNISSQGSNDFQGQLLESSYFEKIESNALRAFIKICHKAIDGRSLGGSLVPRGSGGSAAAYNKTLDCIEVENKDLFLISNKDSLNDINLSEEKIKPETTVFFKDKLPPQDITLSNYDFTEANSIPSISQQNILERNEELYEPIRNSLFEIKTIYVDKLTTFHFLEAQNIDESIDSSKIRVELTDSVDEALSNPNKVYSPFKNMSNTINSIETGITSTYIFYQWLRSIVKDFSDETGKIDVIDKSSDTLAIVPYIGPLLNIGNDIRHGDFVGAIELAGITALLEYVPEFTIPILVGLEVIGGELAREQVEAIVNNALDKRDQKWAEVYNITKAQWWGTIHLQINTRLAHTYKALSRQANAIKMNMEFQLANYKGNIDDKAKIKNAISETEILLNKSVEQAMKNTEKFMIKLSNSYLTKEMIPKVQDNLKNFDLETKKTLDKFIKEKEDILGTNLSSSLRRKVSIRLNKNIAFDINDIPFSEFDDLINQYKNEIEDYEVLNLGAEDGKIKDLSGTTSDINIGSDIEIINTSILNLRYESNHLIDLSRYASKINIGSKVNFDPIDKNQIQLFNLESSKIEVILKNAIVYNSMYENFSTSFWIRIPKYFNSISLNNEYTIINCMENNSGWKVSLNYGEIIWTLQDTQEIKQRVVFKYSQMINISDYINRWIFVTITNNRLNNSKIYINGRLIDQKPISNLGNIHASNNIMFKLDGCRDTHRYIWIKYFNLFDKELNEKEIKDLYDNQSNSGILKDFWGDYLQYDKPYYMLNLYDPNKYVDVNNVGIRGYMYLKGPRGSVMTTNIYLNSSLYRGTKFIIKKYASGNKDNIVRNNDRVYINVVVKNKEYRLATNASQAGVEKILSALEIPDVGNLSQVVVMKSKNDQGITNKCKMNLQDNNGNDIGFIGFHQFNNIAKLVASNWYNRQIERSSRTLGCSWEFIPVDDGWGERPLQ

SEQ ID NO: 120 - protein, 1738 aa, Artificial Sequence
  Synthetic
MSDKIIHLTDDSFDTDVLKADGAILVDFWAEWCGPCKMIAPILDEIADEYQGKLTVAKLNIDQNPGTAPKYGIRGIPTLLLFKNGEVAATKVGALSKGQLKEFLDANLAGGSLVPRGSGGSQVQLVESGGGLVQPGGSLRLSCAASGFPFHAYYMSWVRQAPGKGLEWVSHIGNGGIITRYADSVKGRFTISRDNAKNTLYLQMTNLKPEDTALYYCTLGTRDDLGPERGQGTQVTVSSEPKTPKPQGGGGSGGGGEFMGTQVQLVESGGGLVQPGGSLRLSCAASGSIFSIYAMGWYRQAPGKQRELVAAISSYGSTNYADSVKGRFTISRDNAKNTVYLQMNSLKPEDTAVYYCNADIATMTAVGGFDYWGQGTQVTVSSEPKTPKPQGGGGSGGGGSKLMVTINDLHYSDPIDEDNIINMRIPLYDLEVDDQFINHNVPDLKAFQVFPNVWVVPERYTFYSTMKNLDAPANPSRSSYYDPTYLQSDAEKEVFLQQMILLFKRINSTQEGQQFLNLLSRSIPVPYESNGDVAMGTTQVIKQMDDKGNVLKHRRAHIIIYGPGPDLMAKGSKALTKSRETGRGCMAEIYFSPMYHKTYSTKLTNKNSLVDKSVQEFVPDPAVTLIHQLCHGLHALYGIDLGNVGSWEFNSNPNSLFSSWFSSKEAVNFEEVMTFGGEDVKVIKSEIDKKIPGILNLIKTTVEPIINKITDPHDEMLQCLQSKYPSLKGTLGQFFFDDTQLEKDIRDLWMVMNETMFAENLKALTAARFLVPKVENIVQVDILSPNVYTIDKGFNHLSKGFKGQSVSQSYFRKISALARGAVVRACHKAIDGRSLGGSLVPRGSGGSAAAYNKTLDCIEILEDDLFIMSSKDSFTDTDFSEPSVGPVSYKAKKGADTILDSTLSNYDFSKEINFTSTVPIITVEDPLETDEDVPVISEDRTVYVDDYTTFHFLEAQKIGKEVVPTQTKVVFTTNMEEALFDSKKVYTVFENTASRINEAGTGIANGMMFYQWLKGIVQDFTEEATQKDTFDKISDVTMIVPYLGNILNIGNDIRKGDFMGAVELGGVTILLEAIPELTLPVLIGLTIIEDELEKEQVSQTVYNVLDKRDEKWEEVYGFVKQQWWWMVHTQFETRILHAYQALNHQVEAIKANMTYQLANYRGNQEDKELLEKAIDDTLQSLYYAVDQAMHNIKRFLIQSSKSYLLNQMLPKTKEQLLAFDQQTLRNVNDFINKNQGVLGESLAKDLKKKVEKRLTSLPVFNLEDLPISEFEDLIHSHEIDIQDSEVLNIGVNNGKIQDLSGENTPLTLGENLHIINTSILNLRYESNHLIDLSRYASKINIGSKVNFDPIDKNQIQLFNLESSKIEVILKNAIVYNSMYENFSTSFWIRIPKYFNSISLNNEYTIINCMENNSGWKVSLNYGEIIWTLQDTQEIKQRVVFKYSQMINISDYINRWIFVTITNNRLNNSKIYINGRLIDQKPISNLGNIHASNNIMFKLDGCRDTHRYIWIKYFNLFDKELNEKEIKDLYDNQSNSGILKDFWGDYLQYDKPYYMLNLYDPNKYVDVNNVGIRGYMYLKGPRGSVMTTNIYLNSSLYRGTKFIIKKYASGNKDNIVRNNDRVYINVVVKNKEYRLATNASQAGVEKILSALEIPDVGNLSQVVVMKSKNDQGITNKCKMNLQDNNGNDIGFIGFHQFNNIAKLVASNWYNRQIERSSRTLGCSWEFIPVDDGWGERPLQ

SEQ ID NO: 121 - protein, 1680 aa, Artificial Sequence
  Synthetic
MSDKIIHLTDDSFDTDVLKADGAILVDFWAEWCGPCKMIAPILDEIADEYQGKLTVAKLNIDQNPGTAPKYGIRGIPTLLLFKNGEVAATKVGALSKGQLKEFLDANLAGGSLVPRGSGGSQVQLVESGGGLVQPGGSLRLSCAASGFPFHAYYMSWVRQAPGKGLEWVSHIGNGGIITRYADSVKGRFTISRDNAKNTLYLQMTNLKPEDTALYYCTLGTRDDLGPERGQGTQVTVSSEPKTPKPQGGGGSGGGGEFMGTQVQLVESGGGLVQPGGSLRLSCAASGSIFSIYAMGWYRQAPGKQRELVAAISSYGSTNYADSVKGRFTISRDNAKNTVYLQMNSLKPEDTAVYYCNADIATMTAVGGFDYWGQGTQVTVSSEPKTPKPQGGGGSGGGGSKLLQIRVFNYNDPIDGENIVELRYHNRSPVKAFQIVDGIWIIPERYNFTNDTKKVPDDRALTILEDEVFAVRENDYLTTDVNEKNSFLNNITKLFKRINSSNIGNQLLNYISTSVPYPVVSTNSIKARDYNTIKFDSIDGRRITKSANVLIYGPSMKNLLDKQTRAINGEEAKNGIGCLSDIIFSPNYLSVQTVSSSRFVEDPASSLTHQLIHALHNLYGIQYPGEEKFKFGGFIDKLLGTRECIDYEEVLTYGGKDSEIIRKKIDKSLYPDDFVNKYGEMYKRIKGSNPYYPDEKKLKQSFLNRMNPFDQNGTFDTKEFKNHLMDLWFGLNESEFAKEKKILVAKHFITKQINPKYTELTNDVYTEDKGFVNGQSIDNQNFKIIDDLISKKVKLCHKAIDGRSLGGSLVPRGSGGSAAAYNKTLDCIDVNKEDLYFISDKEGFENIDFSEPEIRYDSNVTTATTSSFTDHFLVNRTFNDSDRFPPVELEYAIEPAEIVDNTIMPDIDQKSEISLDNLTTFHYLNAQKMDLGFDSSKEQLKMVTSIEESLLDSKKVYTPFTRTAHSVNERISGIAESYLFYQWLKTVINDFTDELNQKSNTDKVADISWIIPYVGPALNIGLDLSHGDFTKAFEDLGVSILFAIAPEFATISLVALSIYENIEEDSQKEKVINKVENTLARRIEKWHQVYAFMVAQWWGMVHTQIDTRIHQMYESLSHQIIAIKANMEYQLSHYKGPDNDKLLLKDYIYEAEIALNTSANRAMKNIERFMIESSISYLKNNLIPSVVENLKKFDADTKKNLDQFIDKNSSVLGSDLHILKSQVDLELNPTTKVAFNIQSIPDFDINALIDRLGIQIINTSILNLRYESNHLIDLSRYASKINIGSKVNFDPIDKNQIQLFNLESSKIEVILKNAIVYNSMYENFSTSFWIRIPKYFNSISLNNEYTIINCMENNSGWKVSLNYGEIIWTLQDTQEIKQRVVFKYSQMINISDYINRWIFVTITNNRLNNSKIYINGRLIDQKPISNLGNIHASNNIMFKLDGCRDTHRYIWIKYFNLFDKELNEKEIKDLYDNQSNSGILKDFWGDYLQYDKPYYMLNLYDPNKYVDVNNVGIRGYMYLKGPRGSVMTTNIYLNSSLYRGTKFIIKKYASGNKDNIVRNNDRVYINVVVKNKEYRLATNASQAGVEKILSALEIPDVGNLSQVVVMKSKNDQGITNKCKMNLQDNNGNDIGFIGFHQFNNIAKLVASNWYNRQIERSSRTLGCSWEFIPVDDGWGERPLQ

SEQ ID NO: 122-123 - skipped (2 entries)

SEQ ID NO: 124 - protein, 566 aa, Artificial Sequence
  Synthetic
MGTQVQLVESGGGLVQPGGSLRLSCAASGSIFSIYAMGWYRQAPGKQRELVAAISSYGSTNYADSVKGRFTISRDNAKNTVYLQMNSLKPEDTAVYYCNADIATMTAVGGFDYWGQGTQVTVSSEPKTPKPQGGGGSGGGGSKLMKLEINKFNYNDPIDGINVITMRPPRHSDKINKGKGPFKAFQVIKNIWIVPERYNFTNNTNDLNIPSEPIMEADAIYNPNYLNTPSEKDEFLQGVIKVLERIKSKPEGEKLLELISSSIPLPLVSNGALTLSDNETIAYQENNNIVSNLQANLVIYGPGPDIANNATYGLYSTPISNGEGTLSEVSFSPFYLKPFDESYGNYRSLVNIVNKFVKREFAPDPASTLMHQLVHVTHNLYGISNRNFYYNFDTGKIETSRQQNSLIFEELLTFGGIDSKAISSLIIKKIIETAKNNYTTLISERLNTVTVENDLLKYIKNKIPVQGRLGNFKLDTAEFEKKLNTILFVLNESNLAQRFSILVAKHFLKERPIDPIYVNILDDNSYSTLEGFNISSQGSNDFQGQLLESSYFEKIESNALRAFIKI

SEQ ID NO: 125 - protein, 564 aa, Artificial Sequence
  Synthetic
HVQLQQSGGGLVQPGGSLRLSCAASGSIFSIYAMGWYRQAPGKQRELVAAISSYGSTNYADSVKGRFTISRDNAKNTVYLQMNSLKPEDTAVYYCNADIATMTAVGGFDYWGQGTQVTVSSEPKTPKPQPGGGGSGGGGSKLMKLEINKFNYNDPIDGINVITMRPPRHSDKINKGKGPFKAFQVIKNIWIVPERYNFTNNTNDLNIPSEPIMEADAIYNPNYLNTPSEKDEFLQGVIKVLERIKSKPEGEKLLELISSSIPLPLVSNGALTLSDNETIAYQENNNIVSNLQANLVIYGPGPDIANNATYGLYSTPISNGEGTLSEVSFSPFYLKPFDESYGNYRSLVNIVNKFVKREFAPDPASTLMHQLVHVTHNLYGISNRNFYYNFDTGKIETSRQQNSLIFEELLTFGGIDSKAISSLIIKKIIETAKNNYTTLISERLNTVTVENDLLKYIKNKIPVQGRLGNFKLDTAEFEKKLNTILFVLNESNLAQRFSILVAKHFLKERPIDPIYVNILDDNSYSTLEGFNISSQGSNDFQGQLLESSYFEKIESNALRAFIKI

SEQ ID NO: 126 - protein, 567 aa, Artificial Sequence
  Synthetic
MGTQVQLVESGGGLVQPGGSLRLSCAASGSIFSIYAMGWYRQAPGKQRELVAAISSYGSTNYADSVKGRFTISRDNAKNTVYLQMNSLKPEDTAVYYCNADIATMTAVGGFDYWGQGTQVTVSSEPKTPKPQGGGGSGGGGSKLMVTINDLHYSDPIDEDNIINMRIPLYDLEVDDQFINHNVPDLKAFQVFPNVWVVPERYTFYSTMKNLDAPANPSRSSYYDPTYLQSDAEKEVFLQQMILLFKRINSTQEGQQFLNLLSRSIPVPYESNGDVAMGTTQVIKQMDDKGNVLKHRRAHIIIYGPGPDLMAKGSKALTKSRETGRGCMAEIYFSPMYHKTYSTKLTNKNSLVDKSVQEFVPDPAVTLIHQLCHGLHALYGIDLGNVGSWEFNSNPNSLFSSWFSSKEAVNFEEVMTFGGEDVKVIKSEIDKKIPGILNLIKTTVEPIINKITDPHDEMLQCLQSKYPSLKGTLGQFFFDDTQLEKDIRDLWMVMNETMFAENLKALTAARFLVPKVENIVQVDILSPNVYTIDKGFNHLSKGFKGQSVSQSYFRKISALARGAVVRA

SEQ ID NO: 127 - protein, 553 aa, Artificial Sequence
  Synthetic
HVQLQQSGGGLVQPGGSLRLSCAASGSIFSIYAMGWYRQAPGKQRELVAAISSYGSTNYADSVKGRFTISRDNAKNTVYLQMNSLKPEDTAVYYCNADIATMTAVGGFDYWGQGTQVTVSSEPKTPKPQPMVTINDLHYSDPIDEDNIINMRIPLYDLEVDDQFINHNVPDLKAFQVFPNVWVVPERYTFYSTMKNLDAPANPSRSSYYDPTYLQSDAEKEVFLQQMILLFKRINSTQEGQQFLNLLSRSIPVPYESNGDVAMGTTQVIKQMDDKGNVLKHRRAHIIIYGPGPDLMAKGSKALTKSRETGRGCMAEIYFSPMYHKTYSTKLTNKNSLVDKSVQEFVPDPAVTLIHQLCHGLHALYGIDLGNVGSWEFNSNPNSLFSSWFSSKEAVNFEEVMTFGGEDVKVIKSEIDKKIPGILNLIKTTVEPIINKITDPHDEMLQCLQSKYPSLKGTLGQFFFDDTQLEKDIRDLWMVMNETMFAENLKALTAARFLVPKVENIVQVDILSPNVYTIDKGFNHLSKGFKGQSVSQSYFRKISALARGAVVRA

SEQ ID NO: 128 - protein, 1498 aa, Artificial Sequence
  Synthetic
MGTQVQLVESGGGLVQPGGSLRLSCAASGSIFSIYAMGWYRQAPGKQRELVAAISSYGSTNYADSVKGRFTISRDNAKNTVYLQMNSLKPEDTAVYYCNADIATMTAVGGFDYWGQGTQVTVSSEPKTPKPQGGGGSGGGGSKLMKLEINKFNYNDPIDGINVITMRPPRHSDKINKGKGPFKAFQVIKNIWIVPERYNFTNNTNDLNIPSEPIMEADAIYNPNYLNTPSEKDEFLQGVIKVLERIKSKPEGEKLLELISSSIPLPLVSNGALTLSDNETIAYQENNNIVSNLQANLVIYGPGPDIANNATYGLYSTPISNGEGTLSEVSFSPFYLKPFDESYGNYRSLVNIVNKFVKREFAPDPASTLMHQLVHVTHNLYGISNRNFYYNFDTGKIETSRQQNSLIFEELLTFGGIDSKAISSLIIKKIIETAKNNYTTLISERLNTVTVENDLLKYIKNKIPVQGRLGNFKLDTAEFEKKLNTILFVLNESNLAQRFSILVAKHFLKERPIDPIYVNILDDNSYSTLEGFNISSQGSNDFQGQLLESSYFEKIESNALRAFIKICHKAIDGRSLGGSLVPRGSGGSAAAYNKTLDCIEVENKDLFLISNKDSLNDINLSEEKIKPETTVFFKDKLPPQDITLSNYDFTEANSIPSISQQNILERNEELYEPIRNSLFEIKTIYVDKLTTFHFLEAQNIDESIDSSKIRVELTDSVDEALSNPNKVYSPFKNMSNTINSIETGITSTYIFYQWLRSIVKDFSDETGKIDVIDKSSDTLAIVPYIGPLLNIGNDIRHGDFVGAIELAGITALLEYVPEFTIPILVGLEVIGGELAREQVEAIVNNALDKRDQKWAEVYNITKAQWWGTIHLQINTRLAHTYKALSRQANAIKMNMEFQLANYKGNIDDKAKIKNAISETEILLNKSVEQAMKNTEKFMIKLSNSYLTKEMIPKVQDNLKNFDLETKKTLDKFIKEKEDILGTNLSSSLRRKVSIRLNKNIAFDINDIPFSEFDDLINQYKNEIEDYEVLNLGAEDGKIKDLSGTTSDINIGSDIEIINTSILNLRYESNHLIDLSRYASKINIGSKVNFDPIDKNQIQLFNLESSKIEVILKNAIVYNSMYENFSTSFWIRIPKYFNSISLNNEYTIINCMENNSGWKVSLNYGEIIWTLQDTQEIKQRVVFKYSQMINISDYINRWIFVTITNNRLNNSKIYINGRLIDQKPISNLGNIHASNNIMFKLDGCRDTHRYIWIKYFNLFDKELNEKEIKDLYDNQSNSGILKDFWGDYLQYDKPYYMLNLYDPNKYVDVNNVGIRGYMYLKGPRGSVMTTNIYLNSSLYRGTKFIIKKYASGNKDNIVRNNDRVYINVVVKNKEYRLATNASQAGVEKILSALEIPDVGNLSQVVVMKSKNDQGITNKCKMNLQDNNGNDIGFIGFHQFNNIAKLVASNWYNRQIERSSRTLGCSWEFIPVDDGWGERPLQGSLVPRGSGSLEHHHHHH

SEQ ID NO: 129 - protein, 1497 aa, Artificial Sequence
  Synthetic
MGTQVQLVESGGGLVQPGGSLRLSCAASGSIFSIYAMGWYRQAPGKQRELVAAISSYGSTNYADSVKGRFTISRDNAKNTVYLQMNSLKPEDTAVYYCNADIATMTAVGGFDYWGQGTQVTVSSEPKTPKPQGGGGSGGGGSKMVTINDLHYSDPIDEDNIINMRIPLYDLEVDDQFINHNVPDLKAFQVFPNVWVVPERYTFYSTMKNLDAPANPSRSSYYDPTYLQSDAEKEVFLQQMILLFKRINSTQEGQQFLNLLSRSIPVPYESNGDVAMGTTQVIKQMDDKGNVLKHRRAHIIIYGPGPDLMAKGSKALTKSRETGRGCMAEIYFSPMYHKTYSTKLTNKNSLVDKSVQEFVPDPAVTLIHQLCHGLHALYGIDLGNVGSWEFNSNPNSLFSSWFSSKEAVNFEEVMTFGGEDVKVIKSEIDKKIPGILNLIKTTVEPIINKITDPHDEMLQCLQSKYPSLKGTLGQFFFDDTQLEKDIRDLWMVMNETMFAENLKALTRARYLVPKVENIVQVDILSPNVYTIDKGFNHLSKGFKGQSVSQSYFRKISALARGAVVRACHKAIDGRSLGGSLVPRGSGGSAAAYNKTLDCIEILEDDLFIMSSKDSFTDTDFSEPSVGPVSYKAKKGADTILDSTLSNYDFSKEINFTSTVPIITVEDPLETDEDVPVISEDRTVYVDDYTTFHFLEAQKIGKEVVPTQTKVVFTTNMEEALFDSKKVYTVFENTASRINEAGTGIANGMMFYQWLKGIVQDFTEEATQKDTFDKISDVTMIVPYLGNILNIGNDIRKGDFMGAVELGGVTILLEAIPELTLPVLIGLTIIEDELEKEQVSQTVYNVLDKRDEKWEEVYGFVKQQWWWMVHTQFETRILHAYQALNHQVEAIKANMTYQLANYRGNQEDKELLEKAIDDTLQSLYYAVDQAMHNIKRFLIQSSKSYLLNQMLPKTKEQLLAFDQQTLRNVNDFINKNQGVLGESLAKDLKKKVEKRLTSLPVFNLEDLPISEFEDLIHSHEIDIQDSEVLNIGVNNGKIQDLSGENTPLTLGENLHIINTSILNLRYESNHLIDLSRYASKINIGSKVNFDPIDKNQIQLFNLESSKIEVILKNAIVYNSMYENFSTSFWIRIPKYFNSISLNNEYTIINCMENNSGWKVSLNYGEIIWTLQDTQEIKQRVVFKYSQMINISDYINRWIFVTITNNRLNNSKIYINGRLIDQKPISNLGNIHASNNIMFKLDGCRDTHRYIWIKYFNLFDKELNEKEIKDLYDNQSNSGILKDFWGDYLQYDKPYYMLNLYDPNKYVDVNNVGIRGYMYLKGPRGSVMTTNIYLNSSLYRGTKFIIKKYASGNKDNIVRNNDRVYINVVVKNKEYRLATNASQAGVEKILSALEIPDVGNLSQVVVMKSKNDQGITNKCKMNLQDNNGNDIGFIGFHQFNNIAKLVASNWYNRQIERSSRTLGCSWEFIPVDDGWGERPLQGSLVPRGSGSLEHHHHHH

SEQ ID NO: 130 - protein, 126 aa, Artificial Sequence; identical to SEQ ID NO: 67
  Synthetic

SEQ ID NO: 131 - protein, 560 aa, Artificial Sequence
  Synthetic
QVQLVESGGGLVQPGGSLRLSCAASGFPFHAYYMSWVRQAPGKGLEWVSHIGNGGIITRYADSVKGRFTISRDNAKNTLYLQMTNLKPEDTALYYCTLGTRDDLGPERGQGTQVTVSSEPKTPKPQGGGGSGGGGSKLMKLEINKFNYNDPIDGINVITMRPPRHSDKINKGKGPFKAFQVIKNIWIVPERYNFTNNTNDLNIPSEPIMEADAIYNPNYLNTPSEKDEFLQGVIKVLERIKSKPEGEKLLELISSSIPLPLVSNGALTLSDNETIAYQENNNIVSNLQANLVIYGPGPDIANNATYGLYSTPISNGEGTLSEVSFSPFYLKPFDESYGNYRSLVNIVNKFVKREFAPDPASTLMHQLVHVTHNLYGISNRNFYYNFDTGKIETSRQQNSLIFEELLTFGGIDSKAISSLIIKKIIETAKNNYTTLISERLNTVTVENDLLKYIKNKIPVQGRLGNFKLDTAEFEKKLNTILFVLNESNLAQRFSILVAKHFLKERPIDPIYVNILDDNSYSTLEGFNISSQGSNDFQGQLLESSYFEKIESNALRAFIKI

SEQ ID NO: 132 - protein, 561 aa, Artificial Sequence
  Synthetic
QVQLVESGGGLVQPGGSLRLSCAASGFPFHAYYMSWVRQAPGKGLEWVSHIGNGGIITRYADSVKGRFTISRDNAKNTLYLQMTNLKPEDTALYYCTLGTRDDLGPERGQGTQVTVSSEPKTPKPQGGGGSGGGGSKLMVTINDLHYSDPIDEDNIINMRIPLYDLEVDDQFINHNVPDLKAFQVFPNVWVVPERYTFYSTMKNLDAPANPSRSSYYDPTYLQSDAEKEVFLQQMILLFKRINSTQEGQQFLNLLSRSIPVPYESNGDVAMGTTQVIKQMDDKGNVLKHRRAHIIIYGPGPDLMAKGSKALTKSRETGRGCMAEIYFSPMYHKTYSTKLTNKNSLVDKSVQEFVPDPAVTLIHQLCHGLHALYGIDLGNVGSWEFNSNPNSLFSSWFSSKEAVNFEEVMTFGGEDVKVIKSEIDKKIPGILNLIKTTVEPIINKITDPHDEMLQCLQSKYPSLKGTLGQFFFDDTQLEKDIRDLWMVMNETMFAENLKALTAARFLVPKVENIVQVDILSPNVYTIDKGFNHLSKGFKGQSVSQSYFRKISALARGAVVRA

SEQ ID NO: 133 - protein, 1492 aa, Artificial Sequence
  Synthetic
QVQLVESGGGLVQPGGSLRLSCAASGFPFHAYYMSWVRQAPGKGLEWVSHIGNGGIITRYADSVKGRFTISRDNAKNTLYLQMTNLKPEDTALYYCTLGTRDDLGPERGQGTQVTVSSEPKTPKPQGGGGSGGGGSKLMKLEINKFNYNDPIDGINVITMRPPRHSDKINKGKGPFKAFQVIKNIWIVPERYNFTNNTNDLNIPSEPIMEADAIYNPNYLNTPSEKDEFLQGVIKVLERIKSKPEGEKLLELISSSIPLPLVSNGALTLSDNETIAYQENNNIVSNLQANLVIYGPGPDIANNATYGLYSTPISNGEGTLSEVSFSPFYLKPFDESYGNYRSLVNIVNKFVKREFAPDPASTLMHQLVHVTHNLYGISNRNFYYNFDTGKIETSRQQNSLIFEELLTFGGIDSKAISSLIIKKIIETAKNNYTTLISERLNTVTVENDLLKYIKNKIPVQGRLGNFKLDTAEFEKKLNTILFVLNESNLAQRFSILVAKHFLKERPIDPIYVNILDDNSYSTLEGFNISSQGSNDFQGQLLESSYFEKIESNALRAFIKICHKAIDGRSLGGSLVPRGSGGSAAAYNKTLDCIEVENKDLFLISNKDSLNDINLSEEKIKPETTVFFKDKLPPQDITLSNYDFTEANSIPSISQQNILERNEELYEPIRNSLFEIKTIYVDKLTTFHFLEAQNIDESIDSSKIRVELTDSVDEALSNPNKVYSPFKNMSNTINSIETGITSTYIFYQWLRSIVKDFSDETGKIDVIDKSSDTLAIVPYIGPLLNIGNDIRHGDFVGAIELAGITALLEYVPEFTIPILVGLEVIGGELAREQVEAIVNNALDKRDQKWAEVYNITKAQWWGTIHLQINTRLAHTYKALSRQANAIKMNMEFQLANYKGNIDDKAKIKNAISETEILLNKSVEQAMKNTEKFMIKLSNSYLTKEMIPKVQDNLKNFDLETKKTLDKFIKEKEDILGTNLSSSLRRKVSIRLNKNIAFDINDIPFSEFDDLINQYKNEIEDYEVLNLGAEDGKIKDLSGTTSDINIGSDIEIINTSILNLRYESNHLIDLSRYASKINIGSKVNFDPIDKNQIQLFNLESSKIEVILKNAIVYNSMYENFSTSFWIRIPKYFNSISLNNEYTIINCMENNSGWKVSLNYGEIIWTLQDTQEIKQRVVFKYSQMINISDYINRWIFVTITNNRLNNSKIYINGRLIDQKPISNLGNIHASNNIMFKLDGCRDTHRYIWIKYFNLFDKELNEKEIKDLYDNQSNSGILKDFWGDYLQYDKPYYMLNLYDPNKYVDVNNVGIRGYMYLKGPRGSVMTTNIYLNSSLYRGTKFIIKKYASGNKDNIVRNNDRVYINVVVKNKEYRLATNASQAGVEKILSALEIPDVGNLSQVVVMKSKNDQGITNKCKMNLQDNNGNDIGFIGFHQFNNIAKLVASNWYNRQIERSSRTLGCSWEFIPVDDGWGERPLQGSLVPRGSGSLEHHHHHH

SEQ ID NO: 134 - protein, 1492 aa, Artificial Sequence
  Synthetic
QVQLVESGGGLVQPGGSLRLSCAASGFPFHAYYMSWVRQAPGKGLEWVSHIGNGGIITRYADSVKGRFTISRDNAKNTLYLQMTNLKPEDTALYYCTLGTRDDLGPERGQGTQVTVSSEPKTPKPQGGGGSGGGGSASMVTINDLHYSDPIDEDNIINMRIPLYDLEVDDQFINHNVPDLKAFQVFPNVWVVPERYTFYSTMKNLDAPANPSRSSYYDPTYLQSDAEKEVFLQQMILLFKRINSTQEGQQFLNLLSRSIPVPYESNGDVAMGTTQVIKQMDDKGNVLKHRRAHIIIYGPGPDLMAKGSKALTKSRETGRGCMAEIYFSPMYHKTYSTKLTNKNSLVDKSVQEFVPDPAVTLIHQLCHGLHALYGIDLGNVGSWEFNSNPNSLFSSWFSSKEAVNFEEVMTFGGEDVKVIKSEIDKKIPGILNLIKTTVEPIINKITDPHDEMLQCLQSKYPSLKGTLGQFFFDDTQLEKDIRDLWMVMNETMFAENLKALTAARFLVPKVENIVQVDILSPNVYTIDKGFNHLSKGFKGQSVSQSYFRKISALARGAVVRACHKAIDGRSLGGSLVPRGSGGSAAAYNKTLDCIEILEDDLFIMSSKDSFTDTDFSEPSVGPVSYKAKKGADTILDSTLSNYDFSKEINFTSTVPIITVEDPLETDEDVPVISEDRTVYVDDYTTFHFLEAQKIGKEVVPTQTKVVFTTNMEEALFDSKKVYTVFENTASRINEAGTGIANGMMFYQWLKGIVQDFTEEATQKDTFDKISDVTMIVPYLGNILNIGNDIRKGDFMGAVELGGVTILLEAIPELTLPVLIGLTIIEDELEKEQVSQTVYNVLDKRDEKWEEVYGFVKQQWWWMVHTQFETRILHAYQALNHQVEAIKANMTYQLANYRGNQEDKELLEKAIDDTLQSLYYAVDQAMHNIKRFLIQSSKSYLLNQMLPKTKEQLLAFDQQTLRNVNDFINKNQGVLGESLAKDLKKKVEKRLTSLPVFNLEDLPISEFEDLIHSHEIDIQDSEVLNIGVNNGKIQDLSGENTPLTLGENLHIINTSILNLRYESNHLIDLSRYASKINIGSKVNFDPIDKNQIQLFNLESSKIEVILKNAIVYNSMYENFSTSFWIRIPKYFNSISLNNEYTIINCMENNSGWKVSLNYGEIIWTLQDTQEIKQRVVFKYSQMINISDYINRWIFVTITNNRLNNSKIYINGRLIDQKPISNLGNIHASNNIMFKLDGCRDTHRYIWIKYFNLFDKELNEKEIKDLYDNQSNSGILKDFWGDYLQYDKPYYMLNLYDPNKYVDVNNVGIRGYMYLKGPRGSVMTTNIYLNSSLYRGTKFIIKKYASGNKDNIVRNNDRVYINVVVKNKEYRLATNASQAGVEKILSALEIPDVGNLSQVVVMKSKNDQGITNKCKMNLQDNNGNDIGFIGFHQFNNIAKLVASNWYNRQIERSSRTLGCSWEFIPVDDGWGERPLQGSLVPRGSGSLEHHHHHH

SEQ ID NO: 135 - protein, 704 aa, Artificial Sequence
  Synthetic
MGTQVQLVESGGGLVQPGGSLRLSCAASGSIFSIYAMGWYRQAPGKQRELVAAISSYGSTNYADSVKGRFTISRDNAKNTVYLQMNSLKPEDTAVYYCNADIATMTAVGGFDYWGQGTQVTVSSEPKTPKPQGGGGSGGGGSASQVQLVESGGGLVQPGGSLRLSCAASGFPFHAYYMSWVRQAPGKGLEWVSHIGNGGIITRYADSVKGRFTISRDNAKNTLYLQMTNLKPEDTALYYCTLGTRDDLGPERGQGTQVTVSSEPKTPKPQGGGGSGGGGSKLMKLEINKFNYNDPIDGINVITMRPPRHSDKINKGKGPFKAFQVIKNIWIVPERYNFTNNTNDLNIPSEPIMEADAIYNPNYLNTPSEKDEFLQGVIKVLERIKSKPEGEKLLELISSSIPLPLVSNGALTLSDNETIAYQENNNIVSNLQANLVIYGPGPDIANNATYGLYSTPISNGEGTLSEVSFSPFYLKPFDESYGNYRSLVNIVNKFVKREFAPDPASTLMHQLVHVTHNLYGISNRNFYYNFDTGKIETSRQQNSLIFEELLTFGGIDSKAISSLIIKKIIETAKNNYTTLISERLNTVTVENDLLKYIKNKIPVQGRLGNFKLDTAEFEKKLNTILFVLNESNLAQRFSILVAKHFLKERPIDPIYVNILDDNSYSTLEGFNISSQGSNDFQGQLLESSYFEKIESNALRAFIKI

SEQ ID NO: 136 - protein, 705 aa, Artificial Sequence
  Synthetic
MGTQVQLVESGGGLVQPGGSLRLSCAASGSIFSIYAMGWYRQAPGKQRELVAAISSYGSTNYADSVKGRFTISRDNAKNTVYLQMNSLKPEDTAVYYCNADIATMTAVGGFDYWGQGTQVTVSSEPKTPKPQGGGGSGGGGSASQVQLVESGGGLVQPGGSLRLSCAASGFPFHAYYMSWVRQAPGKGLEWVSHIGNGGIITRYADSVKGRFTISRDNAKNTLYLQMTNLKPEDTALYYCTLGTRDDLGPERGQGTQVTVSSEPKTPKPQGGGGSGGGGSKLMVTINDLHYSDPIDEDNIINMRIPLYDLEVDDQFINHNVPDLKAFQVFPNVWVVPERYTFYSTMKNLDAPANPSRSSYYDPTYLQSDAEKEVFLQQMILLFKRINSTQEGQQFLNLLSRSIPVPYESNGDVAMGTTQVIKQMDDKGNVLKHRRAHIIIYGPGPDLMAKGSKALTKSRETGRGCMAEIYFSPMYHKTYSTKLTNKNSLVDKSVQEFVPDPAVTLIHQLCHGLHALYGIDLGNVGSWEFNSNPNSLFSSWFSSKEAVNFEEVMTFGGEDVKVIKSEIDKKIPGILNLIKTTVEPIINKITDPHDEMLQCLQSKYPSLKGTLGQFFFDDTQLEKDIRDLWMVMNETMFAENLKALTAARFLVPKVENIVQVDILSPNVYTIDKGFNHLSKGFKGQSVSQSYFRKISALARGAVVRA

SEQ ID NO: 137 - protein, 1636 aa, Artificial Sequence
  Synthetic
MGTQVQLVESGGGLVQPGGSLRLSCAASGSIFSIYAMGWYRQAPGKQRELVAAISSYGSTNYADSVKGRFTISRDNAKNTVYLQMNSLKPEDTAVYYCNADIATMTAVGGFDYWGQGTQVTVSSEPKTPKPQGGGGSGGGGSASQVQLVESGGGLVQPGGSLRLSCAASGFPFHAYYMSWVRQAPGKGLEWVSHIGNGGIITRYADSVKGRFTISRDNAKNTLYLQMTNLKPEDTALYYCTLGTRDDLGPERGQGTQVTVSSEPKTPKPQGGGGSGGGGSKLMKLEINKFNYNDPIDGINVITMRPPRHSDKINKGKGPFKAFQVIKNIWIVPERYNFTNNTNDLNIPSEPIMEADAIYNPNYLNTPSEKDEFLQGVIKVLERIKSKPEGEKLLELISSSIPLPLVSNGALTLSDNETIAYQENNNIVSNLQANLVIYGPGPDIANNATYGLYSTPISNGEGTLSEVSFSPFYLKPFDESYGNYRSLVNIVNKFVKREFAPDPASTLMHQLVHVTHNLYGISNRNFYYNFDTGKIETSRQQNSLIFEELLTFGGIDSKAISSLIIKKIIETAKNNYTTLISERLNTVTVENDLLKYIKNKIPVQGRLGNFKLDTAEFEKKLNTILFVLNESNLAQRFSILVAKHFLKERPIDPIYVNILDDNSYSTLEGFNISSQGSNDFQGQLLESSYFEKIESNALRAFIKICHKAIDGRSLGGSLVPRGSGGSAAAYNKTLDCIEVENKDLFLISNKDSLNDINLSEEKIKPETTVFFKDKLPPQDITLSNYDFTEANSIPSISQQNILERNEELYEPIRNSLFEIKTIYVDKLTTFHFLEAQNIDESIDSSKIRVELTDSVDEALSNPNKVYSPFKNMSNTINSIETGITSTYIFYQWLRSIVKDFSDETGKIDVIDKSSDTLAIVPYIGPLLNIGNDIRHGDFVGAIELAGITALLEYVPEFTIPILVGLEVIGGELAREQVEAIVNNALDKRDQKWAEVYNITKAQWWGTIHLQINTRLAHTYKALSRQANAIKMNMEFQLANYKGNIDDKAKIKNAISETEILLNKSVEQAMKNTEKFMIKLSNSYLTKEMIPKVQDNLKNFDLETKKTLDKFIKEKEDILGTNLSSSLRRKVSIRLNKNIAFDINDIPFSEFDDLINQYKNEIEDYEVLNLGAEDGKIKDLSGTTSDINIGSDIEIINTSILNLRYESNHLIDLSRYASKINIGSKVNFDPIDKNQIQLFNLESSKIEVILKNAIVYNSMYENFSTSFWIRIPKYFNSISLNNEYTIINCMENNSGWKVSLNYGEIIWTLQDTQEIKQRVVFKYSQMINISDYINRWIFVTITNNRLNNSKIYINGRLIDQKPISNLGNIHASNNIMFKLDGCRDTHRYIWIKYFNLFDKELNEKEIKDLYDNQSNSGILKDFWGDYLQYDKPYYMLNLYDPNKYVDVNNVGIRGYMYLKGPRGSVMTTNIYLNSSLYRGTKFIIKKYASGNKDNIVRNNDRVYINVVVKNKEYRLATNASQAGVEKILSALEIPDVGNLSQVVVMKSKNDQGITNKCKMNLQDNNGNDIGFIGFHQFNNIAKLVASNWYNRQIERSSRTLGCSWEFIPVDDGWGERPLQGSLVPRGSGSLEHHHHHH

SEQ ID NO: 138 - protein, 1636 aa, Artificial Sequence
  Synthetic
MGTQVQLVESGGGLVQPGGSLRLSCAASGSIFSIYAMGWYRQAPGKQRELVAAISSYGSTNYADSVKGRFTISRDNAKNTVYLQMNSLKPEDTAVYYCNADIATMTAVGGFDYWGQGTQVTVSSEPKTPKPQGGGGSGGGGSASQVQLVESGGGLVQPGGSLRLSCAASGFPFHAYYMSWVRQAPGKGLEWVSHIGNGGIITRYADSVKGRFTISRDNAKNTLYLQMTNLKPEDTALYYCTLGTRDDLGPERGQGTQVTVSSEPKTPKPQGGGGSGGGGSKLMVTINDLHYSDPIDEDNIINMRIPLYDLEVDDQFINHNVPDLKAFQVFPNVWVVPERYTFYSTMKNLDAPANPSRSSYYDPTYLQSDAEKEVFLQQMILLFKRINSTQEGQQFLNLLSRSIPVPYESNGDVAMGTTQVIKQMDDKGNVLKHRRAHIIIYGPGPDLMAKGSKALTKSRETGRGCMAEIYFSPMYHKTYSTKLTNKNSLVDKSVQEFVPDPAVTLIHQLCHGLHALYGIDLGNVGSWEFNSNPNSLFSSWFSSKEAVNFEEVMTFGGEDVKVIKSEIDKKIPGILNLIKTTVEPIINKITDPHDEMLQCLQSKYPSLKGTLGQFFFDDTQLEKDIRDLWMVMNETMFAENLKALTAARFLVPKVENIVQVDILSPNVYTIDKGFNHLSKGFKGQSVSQSYFRKISALARGAVVRACHKAIDGRSLGGSLVPRGSGGSAAAYNKTLDCIEILEDDLFIMSSKDSFTDTDFSEPSVGPVSYKAKKGADTILDSTLSNYDFSKEINFTSTVPIITVEDPLETDEDVPVISEDRTVYVDDYTTFHFLEAQKIGKEVVPTQTKVVFTTNMEEALFDSKKVYTVFENTASRINEAGTGIANGMMFYQWLKGIVQDFTEEATQKDTFDKISDVTMIVPYLGNILNIGNDIRKGDFMGAVELGGVTILLEAIPELTLPVLIGLTIIEDELEKEQVSQTVYNVLDKRDEKWEEVYGFVKQQWWWMVHTQFETRILHAYQALNHQVEAIKANMTYQLANYRGNQEDKELLEKAIDDTLQSLYYAVDQAMHNIKRFLIQSSKSYLLNQMLPKTKEQLLAFDQQTLRNVNDFINKNQGVLGESLAKDLKKKVEKRLTSLPVFNLEDLPISEFEDLIHSHEIDIQDSEVLNIGVNNGKIQDLSGENTPLTLGENLHIINTSILNLRYESNHLIDLSRYASKINIGSKVNFDPIDKNQIQLFNLESSKIEVILKNAIVYNSMYENFSTSFWIRIPKYFNSISLNNEYTIINCMENNSGWKVSLNYGEIIWTLQDTQEIKQRVVFKYSQMINISDYINRWIFVTITNNRLNNSKIYINGRLIDQKPISNLGNIHASNNIMFKLDGCRDTHRYIWIKYFNLFDKELNEKEIKDLYDNQSNSGILKDFWGDYLQYDKPYYMLNLYDPNKYVDVNNVGIRGYMYLKGPRGSVMTTNIYLNSSLYRGTKFIIKKYASGNKDNIVRNNDRVYINVVVKNKEYRLATNASQAGVEKILSALEIPDVGNLSQVVVMKSKNDQGITNKCKMNLQDNNGNDIGFIGFHQFNNIAKLVASNWYNRQIERSSRTLGCSWEFIPVDDGWGERPLQGSLVPRGSGSLEHHHHHH

SEQ ID NO: 139 - protein, 278 aa, Artificial Sequence
  Synthetic
QLQLVESGGGMVQPGGSLRLSCAASGFTFSTYDMSWVRQAPGKGPEWVSIINAGGGSTYYAASVKGRFAISRDNAKNTLYLQMNNLKPEDTALYYCARVASYYCRGYVCSPPEFDYWGQGTQVTVSSEPKTPKPQGGGGSGGGGEFMGTQVQLVESGGGLVQPGGSLRLSCAASGSIFSIYAMGWYRQAPGKQRELVAAISSYGSTNYADSVKGRFTISRDNAKNTVYLQMNSLKPEDTAVYYCNADIATMTAVGGFDYWGQGTQVTVSSEPKTPKPQ

SEQ ID NO: 140 - protein, 268 aa, Artificial Sequence
  Synthetic
QVQLVESGGGLVQSGGSLRLSCAASGSIDSLYHMGWYRQAPGKERELVARVQDGGSTAYKDSVKGRFTISRDFSRSTMYLQMNSLKPEDTAIYYCAAKSTISTPLSWGQGTQVTVSSEPKTPKPQGGGGSGGGGEFMGTQVQLVESGGGLVQPGGSLRLSCAASGSIFSIYAMGWYRQAPGKQRELVAAISSYGSTNYADSVKGRFTISRDNAKNTVYLQMNSLKPEDTAVYYCNADIATMTAVGGFDYWGQGTQVTVSSEPKTPKPQ

SEQ ID NO: 141 - protein, 269 aa, Artificial Sequence
  Synthetic
QVQLVESGGGLVQPGGSLRLSCAASGFPFHAYYMSWVRQAPGKGLEWVSHIGNGGIITRYADSVKGRFTISRDNAKNTLYLQMTNLKPEDTALYYCTLGTRDDLGPERGQGTQVTVSSEPKTPKPQGGGGSGGGGEFMGTQVQLVESGGGLVQPGGSLRLSCAASGSIFSIYAMGWYRQAPGKQRELVAAISSYGSTNYADSVKGRFTISRDNAKNTVYLQMNSLKPEDTAVYYCNADIATMTAVGGFDYWGQGTQVTVSSEPKTPKPQ

SEQ ID NO: 142 - protein, 1617 aa, Artificial Sequence
  Synthetic
QVQLVESGGGLVQPGGSLRLSCAASGFPFHAYYMSWVRQAPGKGLEWVSHIGNGGIITRYADSVKGRFTISRDNAKNTLYLQMTNLKPEDTALYYCTLGTRDDLGPERGQGTQVTVSSEPKTPKPQGGGGSGGGGEFMGTQVQLVESGGGLVQPGGSLRLSCAASGSIFSIYAMGWYRQAPGKQRELVAAISSYGSTNYADSVKGRFTISRDNAKNTVYLQMNSLKPEDTAVYYCNADIATMTAVGGFDYWGQGTQVTVSSEPKTPKPQGGGGSGGGGSKLMKLEINKFNYNDPIDGINVITMRPPRHSDKINKGKGPFKAFQVIKNIWIVPERYNFTNNTNDLNIPSEPIMEADAIYNPNYLNTPSEKDEFLQGVIKVLERIKSKPEGEKLLELISSSIPLPLVSNGALTLSDNETIAYQENNNIVSNLQANLVIYGPGPDIANNATYGLYSTPISNGEGTLSEVSFSPFYLKPFDESYGNYRSLVNIVNKFVKREFAPDPASTLMHQLVHVTHNLYGISNRNFYYNFDTGKIETSRQQNSLIFEELLTFGGIDSKAISSLIIKKIIETAKNNYTTLISERLNTVTVENDLLKYIKNKIPVQGRLGNFKLDTAEFEKKLNTILFVLNESNLAQRFSILVAKHFLKERPIDPIYVNILDDNSYSTLEGFNISSQGSNDFQGQLLESSYFEKIESNALRAFIKICHKAIDGRSLGGSLVPRGSGGSAAAYNKTLDCIEVENKDLFLISNKDSLNDINLSEEKIKPETTVFFKDKLPPQDITLSNYDFTEANSIPSISQQNILERNEELYEPIRNSLFEIKTIYVDKLTTFHFLEAQNIDESIDSSKIRVELTDSVDEALSNPNKVYSPFKNMSNTINSIETGITSTYIFYQWLRSIVKDFSDETGKIDVIDKSSDTLAIVPYIGPLLNIGNDIRHGDFVGAIELAGITALLEYVPEFTIPILVGLEVIGGELAREQVEAIVNNALDKRDQKWAEVYNITKAQWWGTIHLQINTRLAHTYKALSRQANAIKMNMEFQLANYKGNIDDKAKIKNAISETEILLNKSVEQAMKNTEKFMIKLSNSYLTKEMIPKVQDNLKNFDLETKKTLDKFIKEKEDILGTNLSSSLRRKVSIRLNKNIAFDINDIPFSEFDDLINQYKNEIEDYEVLNLGAEDGKIKDLSGTTSDINIGSDIEIINTSILNLRYESNHLIDLSRYASKINIGSKVNFDPIDKNQIQLFNLESSKIEVILKNAIVYNSMYENFSTSFWIRIPKYFNSISLNNEYTIINCMENNSGWKVSLNYGEIIWTLQDTQEIKQRVVFKYSQMINISDYINRWIFVTITNNRLNNSKIYINGRLIDQKPISNLGNIHASNNIMFKLDGCRDTHRYIWIKYFNLFDKELNEKEIKDLYDNQSNSGILKDFWGDYLQYDKPYYMLNLYDPNKYVDVNNVGIRGYMYLKGPRGSVMTTNIYLNSSLYRGTKFIIKKYASGNKDNIVRNNDRVYINVVVKNKEYRLATNASQAGVEKILSALEIPDVGNLSQVVVMKSKNDQGITNKCKMNLQDNNGNDIGFIGFHQFNNIAKLVASNWYNRQIERSSRTLGCSWEFIPVDDGWGERPLQ

SEQ ID NO: 143 - protein, 1617 aa, Artificial Sequence
  Synthetic
QVQLVESGGGLVQPGGSLRLSCAASGFPFHAYYMSWVRQAPGKGLEWVSHIGNGGIITRYADSVKGRFTISRDNAKNTLYLQMTNLKPEDTALYYCTLGTRDDLGPERGQGTQVTVSSEPKTPKPQGGGGSGGGGEFMGTQVQLVESGGGLVQPGGSLRLSCAASGSIFSIYAMGWYRQAPGKQRELVAAISSYGSTNYADSVKGRFTISRDNAKNTVYLQMNSLKPEDTAVYYCNADIATMTAVGGFDYWGQGTQVTVSSEPKTPKPQGGGGSGGGGSKLMVTINDLHYSDPIDEDNIINMRIPLYDLEVDDQFINHNVPDLKAFQVFPNVWVVPERYTFYSTMKNLDAPANPSRSSYYDPTYLQSDAEKEVFLQQMILLFKRINSTQEGQQFLNLLSRSIPVPYESNGDVAMGTTQVIKQMDDKGNVLKHRRAHIIIYGPGPDLMAKGSKALTKSRETGRGCMAEIYFSPMYHKTYSTKLTNKNSLVDKSVQEFVPDPAVTLIHQLCHGLHALYGIDLGNVGSWEFNSNPNSLFSSWFSSKEAVNFEEVMTFGGEDVKVIKSEIDKKIPGILNLIKTTVEPIINKITDPHDEMLQCLQSKYPSLKGTLGQFFFDDTQLEKDIRDLWMVMNETMFAENLKALTAARFLVPKVENIVQVDILSPNVYTIDKGFNHLSKGFKGQSVSQSYFRKISALARGAVVRACHKAIDGRSLGGSLVPRGSGGSAAAYNKTLDCIEILEDDLFIMSSKDSFTDTDFSEPSVGPVSYKAKKGADTILDSTLSNYDFSKEINFTSTVPIITVEDPLETDEDVPVISEDRTVYVDDYTTFHFLEAQKIGKEVVPTQTKVVFTTNMEEALFDSKKVYTVFENTASRINEAGTGIANGMMFYQWLKGIVQDFTEEATQKDTFDKISDVTMIVPYLGNILNIGNDIRKGDFMGAVELGGVTILLEAIPELTLPVLIGLTIIEDELEKEQVSQTVYNVLDKRDEKWEEVYGFVKQQWWWMVHTQFETRILHAYQALNHQVEAIKANMTYQLANYRGNQEDKELLEKAIDDTLQSLYYAVDQAMHNIKRFLIQSSKSYLLNQMLPKTKEQLLAFDQQTLRNVNDFINKNQGVLGESLAKDLKKKVEKRLTSLPVFNLEDLPISEFEDLIHSHEIDIQDSEVLNIGVNNGKIQDLSGENTPLTLGENLHIINTSILNLRYESNHLIDLSRYASKINIGSKVNFDPIDKNQIQLFNLESSKIEVILKNAIVYNSMYENFSTSFWIRIPKYFNSISLNNEYTIINCMENNSGWKVSLNYGEIIWTLQDTQEIKQRVVFKYSQMINISDYINRWIFVTITNNRLNNSKIYINGRLIDQKPISNLGNIHASNNIMFKLDGCRDTHRYIWIKYFNLFDKELNEKEIKDLYDNQSNSGILKDFWGDYLQYDKPYYMLNLYDPNKYVDVNNVGIRGYMYLKGPRGSVMTTNIYLNSSLYRGTKFIIKKYASGNKDNIVRNNDRVYINVVVKNKEYRLATNASQAGVEKILSALEIPDVGNLSQVVVMKSKNDQGITNKCKMNLQDNNGNDIGFIGFHQFNNIAKLVASNWYNRQIERSSRTLGCSWEFIPVDDGWGERPLQ

SEQ ID NO: 144 - protein, 1559 aa, Artificial Sequence
  Synthetic
QVQLVESGGGLVQPGGSLRLSCAASGFPFHAYYMSWVRQAPGKGLEWVSHIGNGGIITRYADSVKGRFTISRDNAKNTLYLQMTNLKPEDTALYYCTLGTRDDLGPERGQGTQVTVSSEPKTPKPQGGGGSGGGGEFMGTQVQLVESGGGLVQPGGSLRLSCAASGSIFSIYAMGWYRQAPGKQRELVAAISSYGSTNYADSVKGRFTISRDNAKNTVYLQMNSLKPEDTAVYYCNADIATMTAVGGFDYWGQGTQVTVSSEPKTPKPQGGGGSGGGGSKLLQIRVFNYNDPIDGENIVELRYHNRSPVKAFQIVDGIWIIPERYNFTNDTKKVPDDRALTILEDEVFAVRENDYLTTDVNEKNSFLNNITKLFKRINSSNIGNQLLNYISTSVPYPVVSTNSIKARDYNTIKFDSIDGRRITKSANVLIYGPSMKNLLDKQTRAINGEEAKNGIGCLSDIIFSPNYLSVQTVSSSRFVEDPASSLTHQLIHALHNLYGIQYPGEEKFKFGGFIDKLLGTRECIDYEEVLTYGGKDSEIIRKKIDKSLYPDDFVNKYGEMYKRIKGSNPYYPDEKKLKQSFLNRMNPFDQNGTFDTKEFKNHLMDLWFGLNESEFAKEKKILVAKHFITKQINPKYTELTNDVYTEDKGFVNGQSIDNQNFKIIDDLISKKVKLCHKAIDGRSLGGSLVPRGSGGSAAAYNKTLDCIDVNKEDLYFISDKEGFENIDFSEPEIRYDSNVTTATTSSFTDHFLVNRTFNDSDRFPPVELEYAIEPAEIVDNTIMPDIDQKSEISLDNLTTFHYLNAQKMDLGFDSSKEQLKMVTSIEESLLDSKKVYTPFTRTAHSVNERISGIAESYLFYQWLKTVINDFTDELNQKSNTDKVADISWIIPYVGPALNIGLDLSHGDFTKAFEDLGVSILFAIAPEFATISLVALSIYENIEEDSQKEKVINKVENTLARRIEKWHQVYAFMVAQWWGMVHTQIDTRIHQMYESLSHQIIAIKANMEYQLSHYKGPDNDKLLLKDYIYEAEIALNTSANRAMKNIERFMIESSISYLKNNLIPSVVENLKKFDADTKKNLDQFIDKNSSVLGSDLHILKSQVDLELNPTTKVAFNIQSIPDFDINALIDRLGIQIINTSILNLRYESNHLIDLSRYASKINIGSKVNFDPIDKNQIQLFNLESSKIEVILKNAIVYNSMYENFSTSFWIRIPKYFNSISLNNEYTIINCMENNSGWKVSLNYGEIIWTLQDTQEIKQRVVFKYSQMINISDYINRWIFVTITNNRLNNSKIYINGRLIDQKPISNLGNIHASNNIMFKLDGCRDTHRYIWIKYFNLFDKELNEKEIKDLYDNQSNSGILKDFWGDYLQYDKPYYMLNLYDPNKYVDVNNVGIRGYMYLKGPRGSVMTTNIYLNSSLYRGTKFIIKKYASGNKDNIVRNNDRVYINVVVKNKEYRLATNASQAGVEKILSALEIPDVGNLSQVVVMKSKNDQGITNKCKMNLQDNNGNDIGFIGFHQFNNIAKLVASNWYNRQIERSSRTLGCSWEFIPVDDGWGERPLQ

SEQ ID NO: 145 - protein, 1545 aa, Artificial Sequence
  Synthetic
MSDKIIHLTDDSFDTDVLKADGAILVDFWAEWCGPCKMIAPILDEIADEYQGKLTVAKLNIDQNPGTAPKYGIRGIPTLLLFKNGEVAATKVGALSKGQLKEFLDANLAGGSLVPRGSGGSEFMGTQVQLVESGGGLVQPGGSLRLSCAASGSIFSIYAMGWYRQAPGKQRELVAAISSYGSTNYADSVKGRFTISRDNAKNTVYLQMNSLKPEDTAVYYCNADIATMTAVGGFDYWGQGTQVTVSSEPKTPKPQGGGGSGGGGSKLLQIRVFNYNDPIDGENIVELRYHNRSPVKAFQIVDGIWIIPERYNFTNDTKKVPDDRALTILEDEVFAVRENDYLTTDVNEKNSFLNNITKLFKRINSSNIGNQLLNYISTSVPYPVVSTNSIKARDYNTIKFDSIDGRRITKSANVLIYGPSMKNLLDKQTRAINGEEAKNGIGCLSDIIFSPNYLSVQTVSSSRFVEDPASSLTHQLIHALHNLYGIQYPGEEKFKFGGFIDKLLGTRECIDYEEVLTYGGKDSEIIRKKIDKSLYPDDFVNKYGEMYKRIKGSNPYYPDEKKLKQSFLNRMNPFDQNGTFDTKEFKNHLMDLWFGLNESEFAKEKKILVAKHFITKQINPKYTELTNDVYTEDKGFVNGQSIDNQNFKIIDDLISKKVKLCHKAIDGRSLGGSLVPRGSGGSAAAYNKTLDCIDVNKEDLYFISDKEGFENIDFSEPEIRYDSNVTTATTSSFTDHFLVNRTFNDSDRFPPVELEYAIEPAEIVDNTIMPDIDQKSEISLDNLTTFHYLNAQKMDLGFDSSKEQLKMVTSIEESLLDSKKVYTPFTRTAHSVNERISGIAESYLFYQWLKTVINDFTDELNQKSNTDKVADISWIIPYVGPALNIGLDLSHGDFTKAFEDLGVSILFAIAPEFATISLVALSIYENIEEDSQKEKVINKVENTLARRIEKWHQVYAFMVAQWWGMVHTQIDTRIHQMYESLSHQIIAIKANMEYQLSHYKGPDNDKLLLKDYIYEAEIALNTSANRAMKNIERFMIESSISYLKNNLIPSVVENLKKFDADTKKNLDQFIDKNSSVLGSDLHILKSQVDLELNPTTKVAFNIQSIPDFDINALIDRLGIQIINTSILNLRYESNHLIDLSRYASKINIGSKVNFDPIDKNQIQLFNLESSKIEVILKNAIVYNSMYENFSTSFWIRIPKYFNSISLNNEYTIINCMENNSGWKVSLNYGEIIWTLQDTQEIKQRVVFKYSQMINISDYINRWIFVTITNNRLNNSKIYINGRLIDQKPISNLGNIHASNNIMFKLDGCRDTHRYIWIKYFNLFDKELNEKEIKDLYDNQSNSGILKDFWGDYLQYDKPYYMLNLYDPNKYVDVNNVGIRGYMYLKGPRGSVMTTNIYLNSSLYRGTKFIIKKYASGNKDNIVRNNDRVYINVVVKNKEYRLATNASQAGVEKILSALEIPDVGNLSQVVVMKSKNDQGITNKCKMNLQDNNGNDIGFIGFHQFNNIAKLVASNWYNRQIERSSRTLGCSWEFIPVDDGWGERPLQ

SEQ ID NO: 146 - protein, 1539 aa, Artificial Sequence
  Synthetic
MSDKIIHLTDDSFDTDVLKADGAILVDFWAEWCGPCKMIAPILDEIADEYQGKLTVAKLNIDQNPGTAPKYGIRGIPTLLLFKNGEVAATKVGALSKGQLKEFLDANLAGGSLVPRGSGGSEFQVQLVESGGGLVQPGGSLRLSCAASGFPFHAYYMSWVRQAPGKGLEWVSHIGNGGIITRYADSVKGRFTISRDNAKNTLYLQMTNLKPEDTALYYCTLGTRDDLGPERGQGTQVTVSSEPKTPKPQGGGGSGGGGSKLLQIRVFNYNDPIDGENIVELRYHNRSPVKAFQIVDGIWIIPERYNFTNDTKKVPDDRALTILEDEVFAVRENDYLTTDVNEKNSFLNNITKLFKRINSSNIGNQLLNYISTSVPYPVVSTNSIKARDYNTIKFDSIDGRRITKSANVLIYGPSMKNLLDKQTRAINGEEAKNGIGCLSDIIFSPNYLSVQTVSSSRFVEDPASSLTHQLIHALHNLYGIQYPGEEKFKFGGFIDKLLGTRECIDYEEVLTYGGKDSEIIRKKIDKSLYPDDFVNKYGEMYKRIKGSNPYYPDEKKLKQSFLNRMNPFDQNGTFDTKEFKNHLMDLWFGLNESEFAKEKKILVAKHFITKQINPKYTELTNDVYTEDKGFVNGQSIDNQNFKIIDDLISKKVKLCHKAIDGRSLGGSLVPRGSGGSAAAYNKTLDCIDVNKEDLYFISDKEGFENIDFSEPEIRYDSNVTTATTSSFTDHFLVNRTFNDSDRFPPVELEYAIEPAEIVDNTIMPDIDQKSEISLDNLTTFHYLNAQKMDLGFDSSKEQLKMVTSIEESLLDSKKVYTPFTRTAHSVNERISGIAESYLFYQWLKTVINDFTDELNQKSNTDKVADISWIIPYVGPALNIGLDLSHGDFTKAFEDLGVSILFAIAPEFATISLVALSIYENIEEDSQKEKVINKVENTLARRIEKWHQVYAFMVAQWWGMVHTQIDTRIHQMYESLSHQIIAIKANMEYQLSHYKGPDNDKLLLKDYIYEAEIALNTSANRAMKNIERFMIESSISYLKNNLIPSVVENLKKFDADTKKNLDQFIDKNSSVLGSDLHILKSQVDLELNPTTKVAFNIQSIPDFDINALIDRLGIQIINTSILNLRYESNHLIDLSRYASKINIGSKVNFDPIDKNQIQLFNLESSKIEVILKNAIVYNSMYENFSTSFWIRIPKYFNSISLNNEYTIINCMENNSGWKVSLNYGEIIWTLQDTQEIKQRVVFKYSQMINISDYINRWIFVTITNNRLNNSKIYINGRLIDQKPISNLGNIHASNNIMFKLDGCRDTHRYIWIKYFNLFDKELNEKEIKDLYDNQSNSGILKDFWGDYLQYDKPYYMLNLYDPNKYVDVNNVGIRGYMYLKGPRGSVMTTNIYLNSSLYRGTKFIIKKYASGNKDNIVRNNDRVYINVVVKNKEYRLATNASQAGVEKILSALEIPDVGNLSQVVVMKSKNDQGITNKCKMNLQDNNGNDIGFIGFHQFNNIAKLVASNWYNRQIERSSRTLGCSWEFIPVDDGWGERPLQ

SEQ ID NO: 147 - protein, 1683 aa, Artificial Sequence
  Synthetic
MSDKIIHLTDDSFDTDVLKADGAILVDFWAEWCGPCKMIAPILDEIADEYQGKLTVAKLNIDQNPGTAPKYGIRGIPTLLLFKNGEVAATKVGALSKGQLKEFLDANLAGGSLVPRGSGGSEFMGTQVQLVESGGGLVQPGGSLRLSCAASGSIFSIYAMGWYRQAPGKQRELVAAISSYGSTNYADSVKGRFTISRDNAKNTVYLQMNSLKPEDTAVYYCNADIATMTAVGGFDYWGQGTQVTVSSEPKTPKPQGGGGSGGGGSASQVQLVESGGGLVQPGGSLRLSCAASGFPFHAYYMSWVRQAPGKGLEWVSHIGNGGIITRYADSVKGRFTISRDNAKNTLYLQMTNLKPEDTALYYCTLGTRDDLGPERGQGTQVTVSSEPKTPKPQGGGGSGGGGSKLLQIRVFNYNDPIDGENIVELRYHNRSPVKAFQIVDGIWIIPERYNFTNDTKKVPDDRALTILEDEVFAVRENDYLTTDVNEKNSFLNNITKLFKRINSSNIGNQLLNYISTSVPYPVVSTNSIKARDYNTIKFDSIDGRRITKSANVLIYGPSMKNLLDKQTRAINGEEAKNGIGCLSDIIFSPNYLSVQTVSSSRFVEDPASSLTHQLIHALHNLYGIQYPGEEKFKFGGFIDKLLGTRECIDYEEVLTYGGKDSEIIRKKIDKSLYPDDFVNKYGEMYKRIKGSNPYYPDEKKLKQSFLNRMNPFDQNGTFDTKEFKNHLMDLWFGLNESEFAKEKKILVAKHFITKQINPKYTELTNDVYTEDKGFVNGQSIDNQNFKIIDDLISKKVKLCHKAIDGRSLGGSLVPRGSGGSAAAYNKTLDCIDVNKEDLYFISDKEGFENIDFSEPEIRYDSNVTTATTSSFTDHFLVNRTFNDSDRFPPVELEYAIEPAEIVDNTIMPDIDQKSEISLDNLTTFHYLNAQKMDLGFDSSKEQLKMVTSIEESLLDSKKVYTPFTRTAHSVNERISGIAESYLFYQWLKTVINDFTDELNQKSNTDKVADISWIIPYVGPALNIGLDLSHGDFTKAFEDLGVSILFAIAPEFATISLVALSIYENIEEDSQKEKVINKVENTLARRIEKWHQVYAFMVAQWWGMVHTQIDTRIHQMYESLSHQIIAIKANMEYQLSHYKGPDNDKLLLKDYIYEAEIALNTSANRAMKNIERFMIESSISYLKNNLIPSVVENLKKFDADTKKNLDQFIDKNSSVLGSDLHILKSQVDLELNPTTKVAFNIQSIPDFDINALIDRLGIQIINTSILNLRYESNHLIDLSRYASKINIGSKVNFDPIDKNQIQLFNLESSKIEVILKNAIVYNSMYENFSTSFWIRIPKYFNSISLNNEYTIINCMENNSGWKVSLNYGEIIWTLQDTQEIKQRVVFKYSQMINISDYINRWIFVTITNNRLNNSKIYINGRLIDQKPISNLGNIHASNNIMFKLDGCRDTHRYIWIKYFNLFDKELNEKEIKDLYDNQSNSGILKDFWGDYLQYDKPYYMLNLYDPNKYVDVNNVGIRGYMYLKGPRGSVMTTNIYLNSSLYRGTKFIIKKYASGNKDNIVRNNDRVYINVVVKNKEYRLATNASQAGVEKILSALEIPDVGNLSQVVVMKSKNDQGITNKCKMNLQDNNGNDIGFIGFHQFNNIAKLVASNWYNRQIERSSRTLGCSWEFIPVDDGWGERPLQ

SEQ ID NO: 148 - protein, 1422 aa, Artificial Sequence
  Synthetic
MGTQVQLVESGGGLVQPGGSLRLSCAASGSIFSIYAMGWYRQAPGKQRELVAAISSYGSTNYADSVKGRFTISRDNAKNTVYLQMNSLKPEDTAVYYCNADIATMTAVGGFDYWGQGTQVTVSSEPKTPKPQGGGGSGGGGSKLLQIRVFNYNDPIDGENIVELRYHNRSPVKAFQIVDGIWIIPERYNFTNDTKKVPDDRALTILEDEVFAVRENDYLTTDVNEKNSFLNNITKLFKRINSSNIGNQLLNYISTSVPYPVVSTNSIKARDYNTIKFDSIDGRRITKSANVLIYGPSMKNLLDKQTRAINGEEAKNGIGCLSDIIFSPNYLSVQTVSSSRFVEDPASSLTHQLIHALHNLYGIQYPGEEKFKFGGFIDKLLGTRECIDYEEVLTYGGKDSEIIRKKIDKSLYPDDFVNKYGEMYKRIKGSNPYYPDEKKLKQSFLNRMNPFDQNGTFDTKEFKNHLMDLWFGLNESEFAKEKKILVAKHFITKQINPKYTELTNDVYTEDKGFVNGQSIDNQNFKIIDDLISKKVKLCHKAIDGRSLGGSLVPRGSGGSAAAYNKTLDCIDVNKEDLYFISDKEGFENIDFSEPEIRYDSNVTTATTSSFTDHFLVNRTFNDSDRFPPVELEYAIEPAEIVDNTIMPDIDQKSEISLDNLTTFHYLNAQKMDLGFDSSKEQLKMVTSIEESLLDSKKVYTPFTRTAHSVNERISGIAESYLFYQWLKTVINDFTDELNQKSNTDKVADISWIIPYVGPALNIGLDLSHGDFTKAFEDLGVSILFAIAPEFATISLVALSIYENIEEDSQKEKVINKVENTLARRIEKWHQVYAFMVAQWWGMVHTQIDTRIHQMYESLSHQIIAIKANMEYQLSHYKGPDNDKLLLKDYIYEAEIALNTSANRAMKNIERFMIESSISYLKNNLIPSVVENLKKFDADTKKNLDQFIDKNSSVLGSDLHILKSQVDLELNPTTKVAFNIQSIPDFDINALIDRLGIQIINTSILNLRYESNHLIDLSRYASKINIGSKVNFDPIDKNQIQLFNLESSKIEVILKNAIVYNSMYENFSTSFWIRIPKYFNSISLNNEYTIINCMENNSGWKVSLNYGEIIWTLQDTQEIKQRVVFKYSQMINISDYINRWIFVTITNNRLNNSKIYINGRLIDQKPISNLGNIHASNNIMFKLDGCRDTHRYIWIKYFNLFDKELNEKEIKDLYDNQSNSGILKDFWGDYLQYDKPYYMLNLYDPNKYVDVNNVGIRGYMYLKGPRGSVMTTNIYLNSSLYRGTKFIIKKYASGNKDNIVRNNDRVYINVVVKNKEYRLATNASQAGVEKILSALEIPDVGNLSQVVVMKSKNDQGITNKCKMNLQDNNGNDIGFIGFHQFNNIAKLVASNWYNRQIERSSRTLGCSWEFIPVDDGWGERPLQ

SEQ ID NO: 149 - protein, 1416 aa, Artificial Sequence
  Synthetic
QVQLVESGGGLVQPGGSLRLSCAASGFPFHAYYMSWVRQAPGKGLEWVSHIGNGGIITRYADSVKGRFTISRDNAKNTLYLQMTNLKPEDTALYYCTLGTRDDLGPERGQGTQVTVSSEPKTPKPQGGGGSGGGGSKLLQIRVFNYNDPIDGENIVELRYHNRSPVKAFQIVDGIWIIPERYNFTNDTKKVPDDRALTILEDEVFAVRENDYLTTDVNEKNSFLNNITKLFKRINSSNIGNQLLNYISTSVPYPVVSTNSIKARDYNTIKFDSIDGRRITKSANVLIYGPSMKNLLDKQTRAINGEEAKNGIGCLSDIIFSPNYLSVQTVSSSRFVEDPASSLTHQLIHALHNLYGIQYPGEEKFKFGGFIDKLLGTRECIDYEEVLTYGGKDSEIIRKKIDKSLYPDDFVNKYGEMYKRIKGSNPYYPDEKKLKQSFLNRMNPFDQNGTFDTKEFKNHLMDLWFGLNESEFAKEKKILVAKHFITKQINPKYTELTNDVYTEDKGFVNGQSIDNQNFKIIDDLISKKVKLCHKAIDGRSLGGSLVPRGSGGSAAAYNKTLDCIDVNKEDLYFISDKEGFENIDFSEPEIRYDSNVTTATTSSFTDHFLVNRTFNDSDRFPPVELEYAIEPAEIVDNTIMPDIDQKSEISLDNLTTFHYLNAQKMDLGFDSSKEQLKMVTSIEESLLDSKKVYTPFTRTAHSVNERISGIAESYLFYQWLKTVINDFTDELNQKSNTDKVADISWIIPYVGPALNIGLDLSHGDFTKAFEDLGVSILFAIAPEFATISLVALSIYENIEEDSQKEKVINKVENTLARRIEKWHQVYAFMVAQWWGMVHTQIDTRIHQMYESLSHQIIAIKANMEYQLSHYKGPDNDKLLLKDYIYEAEIALNTSANRAMKNIERFMIESSISYLKNNLIPSVVENLKKFDADTKKNLDQFIDKNSSVLGSDLHILKSQVDLELNPTTKVAFNIQSIPDFDINALIDRLGIQIINTSILNLRYESNHLIDLSRYASKINIGSKVNFDPIDKNQIQLFNLESSKIEVILKNAIVYNSMYENFSTSFWIRIPKYFNSISLNNEYTIINCMENNSGWKVSLNYGEIIWTLQDTQEIKQRVVFKYSQMINISDYINRWIFVTITNNRLNNSKIYINGRLIDQKPISNLGNIHASNNIMFKLDGCRDTHRYIWIKYFNLFDKELNEKEIKDLYDNQSNSGILKDFWGDYLQYDKPYYMLNLYDPNKYVDVNNVGIRGYMYLKGPRGSVMTTNIYLNSSLYRGTKFIIKKYASGNKDNIVRNNDRVYINVVVKNKEYRLATNASQAGVEKILSALEIPDVGNLSQVVVMKSKNDQGITNKCKMNLQDNNGNDIGFIGFHQFNNIAKLVASNWYNRQIERSSRTLGCSWEFIPVDDGWGERPLQ

SEQ ID NO: 150 - protein, 1416 aa, Artificial Sequence; identical to SEQ ID NO: 149
  Synthetic
